United States Patent Application Publication US 2005/0277123 A1 - sequence listing, part 2

SEQ ID NO: 183 - DNA, 1080000 bp, Homo sapiens
  CDS (826985)..(827017)
  full exon 1 range is 826667-827008
  CDS (843242)..(843315): exon
  CDS (922549)..(922630): exon
  CDS (926021)..(926059): exon
  CDS (929123)..(929176): exon
  CDS (993104)..(993154): exon
  CDS (999547)..(999608): exon
  CDS (1000354)..(1000456): exon
  CDS (1002118)..(1002284): exon
  CDS (1006117)..(1006249): exon
  CDS (1007860)..(1008036): exon
  CDS (1010940)..(1011014): exon
  CDS (1018160)..(1018291): exon
  CDS (1018800)..(1018919): exon
  CDS (1020028)..(1020225): exon
  CDS (1026659)..(1026736): exon
  CDS (1028113)..(1028167): exon
  CDS (1034316)..(1034374): exon
  CDS (1041390)..(1041455): exon
  CDS (1043121)..(1043350): exon
  CDS (1044868)..(1044989): exon
  CDS (1047519)..(1047589): exon
  CDS (1050296)..(1050391): exon
  CDS (1060368)..(1060441): exon
  CDS (1062648)..(1062708): exon
  CDS (1064561)..(1064620): exon
  CDS (1066207)..(1066314): exon
  CDS (1067768)..(1067864): exon
  CDS (1068609)..(1068681): exon
  CDS (1073289)..(1073388)
  full exon 30 range is 1073289-1075279
tattgtttttaatttagtttggctttagacacatggttcaacttggcctagttaggtctgggatttactggtgcctctcattcatttcatcatgttgattaccactggctttttccaaattctgttcttcatagtaatatgtggctctactttggttctcccatttcctttgatgacgtgttaatattgaagggcaaatggaagccctagttctgaatgttatgatccatgattgcccctctgtcatatccagtgctggtaggctgtgaagatgggccgggggagatgttgtcagcaatcaggggtaggcatggcaaggactgtggaaacagacctggctgagggtctgtctccaggatataagtgagccaaccaatggccaggagccaagaggcatggccaggtggtctccttgcaggtccgagaagtctcaatctggttggtggaggctgtttacagagctgaatccacaaggagattggatgagattgagtgcaaggttataggctcaatatggaacaggaggtccaggtggggaaactgaggcagagtccagtggtatgggctaggttaatatgggaaagaagggggcaaaactgtttatgtgagatctgttccatccttggcagctaacctaattctgcccttctaggctgatgtgccaggtttgcctcagtcaggatcgtctgttgtctggatcagggctgagcacatggatagccatggctcttgctcaggagtgcgatggaagaagtggctaatagcagcaatttggggagcccattatgtgagcatcagaccttccccagatacccccacctcactggtggtgaggagttccccatatgttgccagaggagtctggcggggactctaacagtgatggtcctttattacctgcagtttggcagggaaggaacaggcaggaatagaccaagcttcctataaagatacaaatacatcacctcaaagactgacccattaaacgattgtaacttctaacatcttagtctaatccagcttctcacattaacagcttactctcatcaagtccccaaaaagaatggaagccaggacagatgagcttgataaagatggcaatggttctcagccctggtgagacattagaatcatgcgccccagtcccaaagttctgaattaattgatcttgtgggggacccggtatatatttttaaagtctcctgggcagttctaatgtgtagttggagtagcaatcctctgatttagggcactgtgcacttccagggggagggagggagtatggaacaaaggagcccagagtaaaaggaggtcatgggaggctaggaaagcctcctcccacccaaagagtttgcccagtgtctgtcctgcttttgggtctttaggccacttctaaatcttttcacttctaattattccccagcaaatcccacctccttccccaggtcaaagcagactgctataaaggaaaaaggagtggagtggaccaatgtctctttgttaagaaagttccacaagctttgttttactgctttatttggagtctgattttttaataagacggggcaaaaatgggcattagtatttgtattagtccatttttatgctgctgataaagacatactcaagatggagcaatttacaaaagaaagaggtttaatggactcacagttccacatggatggggaggcctgccaatcattgtggaaggtgaaaggcacatctcacatggcagcagacaagagaagagaacttgtgcagggaaattcccctttataaaaccatcagatcttgtgagacttagtcactatcatgagcatagcatggaaaagactcacccccgttattcaattaccctccactgggtccctcccacaacacatgagaatcatgggagctacaattcaagataagatttgggtggggacacagccaacccatatcagtattccacacatccacagaggtacccctggtattcaaggaaaaacagcacaaagaaacagaccactcacattaggattatattgggtgctttttttcacccctaacagtgtttttgtaattgaaatcattaaatgggagcattaaaagggcccttcaaggccatctggttcagcccatgcaccccatgaggaatcagcagggctgcattcaggagcattcaggaatttacctttaccccaacctgagtttcaatcccagcttggctacttgctagctgagccaccttgggcatgtaacttatgttaagtttcctcagtttacttgtccataaaatgggactcatgatacctacctccacaataccacagagtggttgtgaagaaaaaatgagtcaatgacaaatattaatccacttcccttattagaattttgaatactgaatgtgatatttgatcctcccaccatcaccacacacaacagcattttagcaccatcaatttctgtcattagcatttgggatgttctgtggtgtcaacctcatttgatgaagttgactaatgggctacctaggtagaagcagaaaatatcttctcctagcagtttgccacagtgacaggaaattcatcatcattgctatgccttaactagaaagcagtactgtttaaaaaaaaacatggaagggggcccacactcggagtcaaaagaattaggctctgatcccagttccacaaatgtgtagctgtgtgatcttgggcaaacaacttaaactttctgagcctcggttttctcatatgacaaaacttgctctgcccacctagatatgataagggccaaatgaaattgtatatggcagcagttcccaatcagtagcaattctgcctccacccgacccgaggtacatttgacaatatctggagacacttttgattgtcacaactagtgagtagaaggaagggaagctgctaaacaaacatcctacgttgcagatgacagcctcccacaaagagttatcctgtccaaaatgtcaatagtcctgtggttgagaaagggctttgtaactttgagaggctcaggtgtcattcttaaacaacaagtacctatgaggaggttcacagtggctttcagagtcattgccaccttcgttcagctaatttctcagacccctttccaacaggacacagaactatgcggagggcacacccctctaagaagccttgctcagggcaaaagtgcagggcttagcaggctggcccctgtggagggcaggtctcccgccagccagggacacttagaagggttgtgagcatggggaggtttaacccagcatcttcatgtaggtttttcaaagatgcctcaaacccaacatgactcatatcaaattcatgttcatcccacattcactccttctccatggttctctgcatcagcaaatactaccacccttcatccatgagtttgctcaggccagaaatccaaatatctatggattccatccacttctctatatcacctattctctctttctctctctctctctctctctgtgtgtgtcacacacacacacacacaaacacacacacgctgcttaaaagccattcaaaagcttttccgataaagaccaaaatttttaacacagcctggcctctggcctgactctccaactttatttattaccattctcctcacccctgatgctagccaatcagttgtggcttattttagctctttgaaaccaccatgccacagggcctttgcacattcttaccttattcttagacactctcccattttcttgccctaattaactcctatgcttcctgcagatttcagcttccagcttcagcttccagtcattacattttcagggaactgttttctgacctccttgacaagccagttccctctgttatccctcttgtgaccaccacctctcctccataacccctaccctgctggtagtttacatttgtaaaagtcttggatcaaagtgtatctccctcactaaagaaaacattccaccagatttgctaactatcatattcaccacatagcacacagtgccttccacatagcaagaaatgtataaatatttgttgaatatgtgaatatggataccaaaggcaaatttgaggccaactataaaacaaacaaacaaaaggcagaaaaaacactcttaggttcattttaatttttgaaccccttttgtgccaagactagcttttggcctaatggaatatttttatgctaaaatgtctgaaatgctgtctgatgcctctgagcacacttaggcaaacatttctggtacaaagagagattatcaggcaatctgccttccctagcaccaaatactgttttccttgggcacgtcccagcagctgctgataaatctgcagacagtccttctcaatgatctttgtctcccagctttatcaaggcagcttctaggaacaatgctcctactcagctatcaggctggtcctacataggggtccattttggagactctccttaaagttatctgactgcactgcgctttcctcatctgtgaaatccataactagcaacaaggcaggaaccaggctctgcccaccaaggcccatgggggtggctctgcaggtgaggggatgattcttccatctcctgtgtggtggagcccccaaagggagcccaggccttctctctgcgttctactccaaagggcagttctcagatatagcaactgtgagtgatatatttttattttcccggaaaaatactgagcttctgttcaaatgagatttaagccaacatgaaagatggaatgtgctattttttttctttcctaaggtcctcgatgtcacatccagcaaaagcaggttgcccatattgtggtaattattgtctaagctcttattttgaacaaaaggaaattgtgtgtgtgtgtgtgtgtgtgtgtgtgtgtgtgtgtgtgtgtgtgtgtgacagagagagagagagagagagagagcaagagagcaagagagagagagattgacctggggaaggagaggcaaggagggagaaagaaaggaaatagaaagaagagagagacagcagagacagaaagaggaatgatgaagggaaagaaaagggagttcattccagggaattttttttattaaattccaacacgaggaagctctgtgtacatgggctccccgttttctccttctgaagcctgaaggcaaaccaggatgctgtgtcaattacagaaaaaaatcaatgaagatactgttcaggagtccttttcaccattcagtgcggatggtatccttcactttctagcactgattcattgactttcagcctctctgggggctgctgacatattgctatctctgaagaatctgaagcaaaatcacctttgtttcctactgcaacttgttcctccgtgcagttcgttagaggggccaccacatgacctccctcggctcgtaggactgaagggcaagaccttgctgggctcgccatgggctttggtgcctccctccatcaacctgccatctcccccgctgaggcacccagggcccagtcaggcctcctgactgtaggctgagagcctcataaattttcaaacactgtttcctctactgtgtctattctgactctaaaacaaattcctgctccagtactagtaccctcctagctcaatagcattgtagaagacatcttctaaagaaataaaacctattccaaagcaatggcattgatgaaggaagcccaggcattaagacacagaacatccctggagcaggcactggaagtgaggtatggagccatctgcacaactggatttccactacgacagtgccattcatttgagttaagtaatgcccttctcttttggccccattttagattttgaacatttctttttttttttttttttttttttttgagacggagtctcgctgtcgcccaggctggagtgcagtggcgcaatctcggctcactgcaggctccgcctcctggggttcacgccattctcctgcctcagcctcccgagtagctgggactacaggcgcccgccacctcgcccggctaattttttgtatttttagtagagacggggtttcaccgtgttagccaggatggtctcgatctcctgacctcgtgatccgcccgcctcggcctcccaaagtgctgggattacaggcgtgagccaccgcgcccggccgattttgaacatttctagagaggttaagacttcagtccttgtactagtttcttattgctgctgtcacaaattatcacagtcttacagcttaaaacaacaaaaacttattctctctcaagttctagagttcagaagtccaaaatgggtcagcaggactgcattctttctggaggttctaggaaaggattcatttccttgctttttctagcttctagaggccacctgcattccttgactcatggtcttctctctccattttgaaggccagcacatagcatcttccaacatagtgctctctctcttgctctctctctctctctgtcatcacatcaccttttctggctttgcttcctttgtcacatctccttctctacctttaccttcttatgaggatcatgtgattacatcaggcccacccagataatccaggataattttcccaactcaaaatccttcaataaatcatacctgtgaagtcccttctacctataaggtagtgtgttcacaagttctaggaattaagacatggacattcgggaaaggcattattctgtctgctacactccctgactttttagtataagcaaataaggccacccaatttcttcccagttggtgacagagatcagtggagagacacaggagtcaggtaagaggggaatggtgtgcactaaaaagggggcaaagagtacagagttgagaggtagaggtggtatagcattgatttcattgatttttttttcctgactttatgagtcatgtagaaggattgtcagctaaaatggtgctgtaaatttatggtgtgcattctctccaccccacctctattcaaacacaacgatgacagaaaaagtgaaatctaatttaaaaaatttaaaagacacaaaacatccccacggaccaggaacagaaaaaaacagaaacatggttaaagcaccaggcttgctgggccttgagttcgaaaggatgtactcgttactgagcaaccaatgagctgacagctgcctgacgtgaagccaataccatggcatcagcttttgagcaaagaaaagctttattgcaagtcaactggcagcggacaggaggaaatgctcaaatctgtctccctgagctgggagctgggactggtattacaagcatagcataatgagatgtgatctgattggatcttataatgagatgataccagggctccatatgattggatcctgaatcctgtcattcagtgtctccttcttaattcagttcttgcgcctccatcttagcacttaggttctgcccatggtttcatacatggttcatctgggcatgttccaattacatgagcttcaacgtggaggtctgtggcaactgcaaaacaattcacagctttgtcacataaaagtttaactagattggtctggtgtggctacatattcagtcaactaagagggtggttcctgtggagataaaggggcccaaagttccacgaggtgaggctgaccctgaaaccagagatgggttgggggttccctgcttgtgaaagggatacgaaaaagctttctagctaccccggccaggggctgatgctgagttgaagctgtgcacacctagggaggcagagagaagcaggcttcacaaccaagacctaggccaagccacccactggctcgatgaacacttttgagatattggcaatattatcgtgcgctgggattctcaagccaacaattatttagttctgatagggtgttccaaaggtccaaactgctagacagaacgatcattctggttattactgttgcatagcaaatcacccaacaattctgtagggtaaaacaagtcattttactttgctaatgtattctgtagcttaggaatgcagacagggcatagcaaggatgtctagagcctctgttggaggtgactcaatggctggagtcaccacctggaggcacatttgctcacatatctggaggttcatgctaattcaagacgttagctgagctgttggttgccctctacatgtgttctctccatgagggctattttggccttcctgatagcgtggtggctgtgttccaaaagtgagagtgagcatcccaagagagcaacgtggaagtgtacggcatttcttttcttttttctttttttttttttttttttttgaggcagagtctcgctctgtcgcccaggctggagtgcagtggcacaatctcggctcaccgcaacttctgcctcctgggtttcaggtgattctcctgcctcagcctcctgagtagcttgcattacaggcacctgtcaccacgcccagctaatttttgtgcttttagtagagacggggtttcaccatgttggtcaggctggtcttgaacccctgacctcaagtgatccatcagcctccgcctcccaaagtgctgggattataggcgtgagccaccgcgcccagccagtgcatggcatttctatggtcttgactcagaagtcacagtgtcacctcatcataatctattgattgaggcagtcacaaaggttggtttaggatcaatgcgagtggacatagaccccatcacttgtgaggaccattagtcagattccaacacaagcatgtaagatgggaagtattttttgcctaataacttgctgagaagttttgagatatcagaaatattattgtgggttggaatccccaagccaacactccaacacttagttctgattgagataccccaggaggcaagtagagatacctactaaagtattagatagagttagccatagaggatgggagggaaaacttccgcctcactcaaaatgagtctgcaaactaatagtccaaaatccgaaatgtaaataatctaagaaagctaaccagaaaaatcaacaactgagagatgaaatcacttcacaaaaaaattaaaataattgagcaataagaaaatgattttttattaaatacttctgtgataatatcctgaaacaatgaaagaaatagcatctttaaaagtaatgagattatcaaattagaaagcagaattaatcaaaataggtgattataaaaggtaactgtagaaatcttgaaaaataaaccacaatggatgagatagctctaaacttgatatggtgaaaaagataattagaaaatttaaatataggacaaaataatttgctcataatatacaacagagaaaaggatgaagacatttaaaaatggttaaggggacagtttcagttgtggtaatagtattgtagcttgtttcagactctctcacacataacaattataaactctgtaaaaaatattaaaacaaacacttgaagacactgaagaacaaccaaaagcaggcaaaatctgaaagagatatgtcccttgaaaggcggaagccatgttggatgacatatagccattttcagttgagagcagactccagtccatacagtgaagagtcaccagatctcaagcagaaagctgcagtcttattgacttcaggtgtcagaggatagagttccagggcagctggaaattagagaagcaaatcctggaaaggagggagccatggcatgaggtgccaaaaatctgcatacaaactccccttaaattattggctcacccctaaaatgcatattcacaataaggattctaaaaagacaagcaaaaatcaagttgaaatggtaaaataactaagcagagatatcggatgcccaccccaagagagtgagagctatcaagttgggaagtcttgctaaacaccttgagctttatacagacactccctcttactaaaggcaaaaccatgcctccacatgttcaaagtgatgagtcagtgatttaactccatgttagaattcttcagaggagggtcacagaattcagagtcaccacaacatatcatcgcagtgtccaacatgctatcaaaaatcattaagcatgtgaagacacaggaaatgtgactaatagtaaaaaaaaaaaaaaatgtcaatagaacagactctccctccaacccccagccccaatgattcaggaaatttgattaaacaaattttgatatttttctacagtaaaggtctactcagcaaaaggaaaaaaatggactactaatacatgcaacaacatggttgaatctcaaaaacactttaagtgaaatagaccaaacacaaagatatatgctgcatgattccatttatacaaagttttttttttaattttatcattattatactttaagttttagggtacatgtgcacaacgtgcaggtttgttacatatgtatacctgtgccatgttggtgtgctgcaccccatttatacaaagtttgagaacaggaaaaaacaactaccctgtgatgaaaaaaatcagaacagttttccatgagaaatgagaattgactaaaaggaagcataagaaaatgttattgaagatggaaatgttcttaattttgattgggattgtggtttcacaggtacgaattttacctcacagtacgaattttcacagtgtacgaattttacctcaatttcacagtgtacgaattttacctcaatttaaaaagtaaaagaatagttgggaaacagaggatagattgaaaaatttgaaaacatatgtaatcagaattctagaagaactgaagaactgatggcaagacaacattcaaagaggaaatggctaagaattgttgagagatgttgactcctcagactgaaagtgtacaccaagtgccaagcacaataaacaaagataaatcccacttagacatagcatcgtgaaactgcagaacattaaagataacatcataaaagctatgagaaacagggagaaagaaaagattttctacaaagacatgctcattaaactgacctcaatcttttcatcagcagcatggatgccagaatacaagtgaacaatatcttcaaagtgttgtaggaaaatgtaataaaagccatataccttgctaagtaccatataccttctagagtcagggcaaaataaagacttgttaaatataaaaaactaatagtttttttaaccactcacatgcttcctgaataaactactaaaggacattttccaacaaaaagaaaagccaaattagaggcaaggtgtggggctaaccagaaaactcagaaatagcagaacatattggcagccaccactagctagtaactacagtcagtcaaagacaattttagtattttaagaggtaattaatgtaaaagtaacataatgaatgttcattgtagaaaatttaaaaagtacagaaaattataaagtataaaaaccacccaaagtccagcactcagagatcacattgctgtttccactagccatgtacccataactgagaacctgtaccagtgtatgttcttttcaagaagatatttaatgatatgcattattacattagatgattcttccacaatggatataaacaatctgcctttcgatttgtccctgtatttactattttccataatgttgctataaaaatctttgtgcatacatttttgtatgcgttactttgctagatccctagcaaaggcagttctgtaaattctgtccattgtagaaagacctggccttattggagcagatggagcattcagttcctctcaaatgaaaggcatctggggagtataaacaaccctgtactgagaagccaagatgggattttgaatctatcctttcgctgaccaggccaatcaattgcttctctgggctccaggatcctcatatgtaacaacgaagttgggtagagcgtttggcaggtcccttcctgctgtaaccttctacaccacacaggcagatatcctgttcaaaccgccaataataaggcctgatcatgtccaaaagagcccccctttccccagaaaaaagtctggctctacaacaatggaaaacttctccctagtcccagctcccagggcaagtgacactatgaggcaagagctgcttgcagagagaggggaagctgaaaccgcacccctgggtgggatcagatttccccagtaaagactgacctcaacacccagaatgtgctcctggcccagggtgctgtgctggaggccaagtcggcttctctgacatgcttgccggggctagagttggcctgtctcctcggcctgtggcccttcaggctgaacagacccacagcaatgttctggtgcagcgcttcccacaagcagaagatagaagacaaatccctgaggtctgaaaatcatgcataaaaagacctacagcaaaagagaaaaatctgtttttcactttaaaatgcatgtgctttttctaccttattccataaagtttctgtatttatttgagtgtagaaaacgtttcccccactcttcaagtaaaattgatatcccccagaagatgaaccacattcactgtgtggcttaaaataaccccagcacacacaacatccccgaccagtggaaagcgcaagtagctgggttagagaagcaggactctcctctgccccgcaccctctgtgcttgctgtcagtagcctggctgtcctcaacctcagcactgtttccagtcctcagcctgggagctactcaatttgtctctcctgtttttttcagtggtcgcattttgaagatgctagatgtattattccgaaaaccagctgtccctaaatgagctatgcctccaagtaactccatagttggtgataggatgtttcctggtataggtgtattccacataagtgaaaaaaaatagattatcatcatcttgcaaccctctaatgaattaaaagatctgggtcatgatcatcaatggcagctcacaccaaaagggagacaacaagacaccctgggacttctgacgcagcaccgcctataaagtacgccaggctaacaacaaaaaacaagcctgaatctgaagaagtttcgcaatccaactaccagtgtgcaggaaatacagaggaatctgttaaatgacatcagtgcaatcagtgagatccacagcaaaacatccaatttcctcaatagtaaattgtaaaggggtgaaaaagagaaagagggaaatctatgaactaaaaagagatatcaagcacatgcaatctatgagtcttacatgttctgatacaaacaaactcactatttaaaaatcactggctgggtgcggtggctcacgcctacaatcccaacactttgggaggccgaggcaggcggatcacctgaagtcaggagttcgagaccaacctggccaacatggcaaaacctcatttgtactaaaaatacaaaaattagccgggcgtggtggcgggcatccctagttccagctactcaggaggttgaagcaagagaatcgcttgaacttgagaggcggagattgcaatgagctgagatcgtgccactgcactccagcctgggcgacagactctgtctccaagaaaaaaaaaatgatgcgttcagtgggtacagagtttcagtttgggataatgaaaaaaagctctggagatagatggtggtgatggttgcacaacaaggcaaatgtagtcaatggtattgatctatacacttaaaaatgggtaaaatggtatatttcatgttttgtataatttactacagtaaaaattgtttttcattttttaaacgatttatttttctaactacatgctagtatgtaaaaaaaagtttatgaaactactaggaaaatttgaacactgactagatatttgatgatagtaatgaattactagggctgtattttatgtgtctttatcttttagagatatatataaaggtatttatggattaaatgatatgatggctgtgatctgctgcagattaatccgatgctggtggagggggtggtataagttatataagagtggccaggaattggtgactgttgtagctgatgatggatacaggggtttattgtatatttgaaatgttccctagtacaaagtttttaaaagaagactctggccttgtatagtttacatttgtctgtgagaaaataaataaaatatttagaatatcagctagtgataagtgttaagaagaaaacataagtcaggaatataggaggaggtgcaggctggaaatataagtttggaaattttcagcatgtataaatgcttaaagtcctgagctttgaatgagccatggttacgttcatctagggaatgagtataaatagaaaatagactgaattctgaactctggggtcctcagacctctggctgagaggttggagaaatgaggacaattcaaaaaataattctgaaaagtcagtgagggagcaggaaagcccgtagtagcaggaagtccctaaatccagagacaaacccatttcaaagagggagtgatcacaaatgtccatttatgctcacagcctagtaaattcagtactgaagatgggccattagatttagcatctaaatatctgacctcatgctcctcccggcttctgatctccagctggagtcttgcatgattgaatccagtctagagccagagggcaaggaagcccacagaggcagtccagaatggagagggcctatgggagagcacccagaagacagctgtcacaggaatcttgcctccttcaatccccatccttttggagcacagagttcagaaatgtagggactgtgtttcattagagccagagtaaagctatcatcaccatcttcatcttcttcattctcatcgtcattcttgtttacccaaaaggaatcttaatcattcaaggtgccttgtttcactgtggcagagccaggataacatcccaagcctttggactcctggttcagtacattgcaccatcttccccaacatctccccagtcaccctgctcctgtgaccacatggatgatttacctttattcatcagttaacccattctcatggctggaagtttacaataaggacccctgcacagaaatcccccaagtctgcacactctgtagctgtttgttctttctttttttttctttttttttttttctttctttgtttttttttttttttttttttgacagagtctcactctgtcacccaggctggagtgcagtggggcaatctcggctcactgcaagctccctcccaggttcacaccattctcctgcctcagcctcctgagtagctgggactacaggcacccgccaccacgccccgctaattttgttttggtatttttagtagagatggagtttcaccatgttagccaggatggtctcaatctcctgatctcgtgatctgcctgccttggcctcccaaagtgctgggattacaggcatgagccaccagtccgggcccattctttattatttgtaccacatgtggcatcatcctaaagtcactggaaactgggagcacaagggccacactaggtcctgaagaaatcccgaggtgagtgggaactgtcattaccaataaagagctacctcatttaagtggtctctcctttcagcagagcacagtgtgctgctgccatggctgctgccagcaaaggctgccttccagatcggctcctttctggacatgtgcaaggaaatgtcctgggcaggcaaagtttccattggttttcagatgaaggggctgttttccaggggttgatcccaggaaacataaaagtggagaccacctggggcttcagtccaccctgtgatgttattcttgaagattaagataatttaggaagagtaataaaaaatatgagctaatatttgttgtgtgtttgttatgtcaggcactgttctaagcactttgtgtgtgtgttcaggctgaatcattggaacagcttttggagggacatgcatgtattaccctgacagtccagtcactccactgccccactcatctggatgactgtgtcactcctcctctctcccaaagctgcaggggtaccaccttcctcattcttgctgtcatctgatgactccactaagaaagtacaagaaaccagaacagaacttccccagctgcacgtcttctaccaccagagagtctgtgtcaacatgactcccctcctgctgccatggaagatggccagcccttgtgcatgcgcagtggaccctatccgctcttgcctactctagggcatcgcatcagtggttctcctctcccccatcatcatgttgttactctctgctagttcactccctacagcctaccaacatgctttaatttttcccatgttaaaaaaattccactcttgactccgtatactcctccagttaccaccttggttttcagtccccatttacagcaaaaatccttgaaagagttatttattcttgatctctccaattctcccccaaatctatcctactggggcttttgcctacacccttccatagaacccagtcctgccaagattaccagtgacttacctaaggggccttgtaccctgggatgctgtggggagcttctgtcctttgctaagattgagtgggggagggaactgcctagagctgcctcactctctcatcttcttcccctattccctccaccttcccttctctctccccaacagtctctacctcctactctccccactccctctccatttccctttccccttcttcttccctcctctccctacctgctctcatcccaccccatttccaccccatccataagaggtgggctgtgtggagcatgggtctcagagccagagacacaggcttgcaccctggttctgccactcagcagctgagagacatgggtgagttgcttggctctcagggttcagttcactcctcggtgagaggagaaactaatgcctcatggtgttctccagaggggtcgggagaccatgttggtgtcaggtcaaatgcaactcttagtgtgtcatttgctcgtagttttcctctctgtggcactgtctaaagcttccagaacaaatcaccacaaattggaggacttaaaaggcagaaatttattctctcacagctctggaagctaaaagtccaaaatcaagatgttggcagcattggttccttctggtgactctgagggagaatctgttctgtgcctctccactggcttctgatcgtggctcacagttcttggggttccttggcttgtgaccacatcactccaacctctgcctccatcatcacacggccttcttctctccgtgcctctgtgtccaaattcccctcttcctataaggacacagtcattggacgggagcccaccgtaatccagtatgacctcatcttaacttgactacatctgaccttatttccaaattaggccacattcgcaggtactgagggttagaacatcatatattttgggcagggacacaattcaacctacaacattgtcctgaaagtttgtgcccattgaactgcaggcaacacctgggaggtgctcacagattaagcagagtggagcgccataggggtagtcaaagaaaaggctgtgctgggaaggaggcctgagccttaagccctgcaggaaacacatgagtacaagtgacaacctgggcttcaggaggaagatggaagtgggttgaagcccagctccccgatttgctgcggtgagccttaaacttttcagggaatcacagatgctcccccctcagaaaagtactcacatacacacacacacacacacacacacacacacacacaactgagcttatgatttcaggggttcatggatctcaaacacctgaatctcagaagaactcctgacttccacactttgtgacagtagacaagttatttagtctctccgaccttcagtttctgcactgatgacatggggatgtggtcattacctgcaggctgttaggaagatgtgtgagaattcagtgtggtgacatctgcacgtggcgcagttctgatctccagggaccccagggaatggcagtcattgctcctggttctcttgccacccttctttcctccccactgcctgctgctcctgctccctgggcatggactctcatttccctctccctctccctctccctttcccagttgggctggagatcttcagcctattgggcttgaagaaggtagaagccggggcagagaagaagtgtagggtgatgaggcgatgccctacttctctcatccattaccattagaaatgcctttctgcaagacgtcccagctgacatggactgggaaccatatttttaaaaaataaacatcagaccttaaacaacatatcatgggcactgtgtcagaatgtctctggccaaattaaaccccagctcatctggtttaaacaatatggaatatttgattttccttcacatagctagaggttgtggtgaatggaagctgcaggatcagttagttccatggctcacgacatcctcaagggcccagctccttctgccttttcactgtatcatcctcggtgttagctttgtcctcagctgtctcccctcatggtcacaaaatgggtgccatcgttccagatctcccaacaaacacaatgttcaggggaagaagagggactgctcttccttgggtcttattttaaaactgaggtcatctttctcagaaatcctcccagacacctcccttcacatcttgtcggccagaaggggcctgtgctccactgagagactatgtggaaagaatatggaattaggatagtgggattagactcaccagaaattagtcttttttttttcttttttttttttgagacggagtctcgttctgttgcccaggctggagtgccatggtatgatctcagctcactgcaacctccacctcccaggttcaagccattctcctgcctcagcttcccaagtagctggtattacaggcacgcacaaccatgcccaggtaatttttgtatttttagtacagacagtgtttcaccatgttggccaggctggtcttcaactcctgacctcaagtgatccaccagcctcggcctcccaaagtgctgggattacaggtgtgagccaccgcacccagccccagaaattgatcttaaggagaagatgggtgttggagcatccactgacagtgcctgttacaggtaccaatcaggaggctcagtgtgttctgaggtaatagaagatgcagagcttgtggatgagtcaagcttcaatgcaatgatccaattgtgaaacacagtgcgcaaaagattgcttaatcctaaattgtaaattaaggggaaaatgtatcattaatgagagcagacaagagaaatgcctaattctaaattgagagtggagaatgagggcaggaaactggggatggttgcttagaggagacgccaataataaagtgaacacatcttcagcgtttagtatatgcccgacacaatgctaagtgcatcacatgcattaactcactgaaccccttcagtcgtcccgtcatagttactgcaagttcccatttggtggtgaggaaactgacgcacagagaggttaagtaacttttcctaggtcattaactttgttcactggtccctgaactaacttgattctggttgacttcagacccattctgttacttaatccctggccattcctcctccctaacctcataaaacaaaactttctaagaagacaaatatgagttccccagatggtgaagctagagaaaggaagttagtaagttcaggcagaaggggcagcaaatcagaaggagataagaaggatcaaatacaccttctagaaatgtattagcaggtttaggcaggaggcagttaggacctctgttagttggtccaaaaataaaggaagaggcaaattgaaaatatgtatatacattattttcaaaagaggaaatattagtattaacattaatataattaatgatggatgggtatttccagaactgagtttcatgtcatcagccttaagaaaaactgagtttctataaaggattcttgagatttggaaatgaatctagaaagccattcagtgtccaagcgagttggctcacaggccatacttgtagttcctccatatctgccagtcaatattctccattctctgcctccatgttccagagggaactaggagtcttcctcttggtcaccaaataggctattgatcaatgggtgggcggaccacagtcatgggtgcacagcccagcactgcttcccaccaagggccataggcagggcagaatcagctaaatagaccctaacacaaggcaggataacaaagaagggagaatcaaagctgacccaaagaactgggaagatgaggttcctggaagcagcaaagtggatggagaacatttaaaagaacaagtttgtaggaggaaggaaggtgttcagttttgaatagctggttttgagaagatgatggtacatccaagagatggcattagaggggcagaactagaatgcagggcaggactttatacacagagatgagattcagtcacattgatgtgaccattcattccattattgagagtgtatctggcactgtcctaggttctagagctgcagccatgattagaataaagcctctgcccttgtgcagcatgcaatcgaatatccaagcccttgaaaagaaatgatcctctgcacaactctccatactattttctgtatcctgtgtgaccatgcaaagaaaagggtgaggctgagttgggaaaacacaacgaagatggtgaacaaatgaaaactgaaacagggaaagcaccatcggagaacagagaatcgagaaagtgtcattttatggaagccaaaagaggaatgagtttaaagaagaaattagtgtcaaatggccccaggctagcagcaaagaaaaagtcatgaaatttgacatgagggttgccattggtaagcttctagcaatggtttttgatccttactgtgcatcagaatcacctgaggagctttgaaatacacagatgcctgggagctaatttcgagatccagactcaattggtctgaagtgagacttgggcaccagtattatgtttcagtgactctgatgatgctaagaggcaggtagagtcaagaaacactgctttaaagaaagggattccagcaaatgttcattggctccatttagcctttccacaatgtgtacatatttcaaaacatcaagttaaatgacgagttaatgggtgcagcacaccagcatggcacatgtatacatacataactaacctgcacattgtgcacatgtaccctaaaacttaaagtataataataataataataaaacatcaagttgtacaccataaatatatacaggtgtgatttgtcaatttaaataattaattaagggagctctgacaaggaaaataaggaagtgattcttgtagagtgatagcagtagaagctaaattgcagagattaaaaagaagggtgtgtttttttcatagagagactagcagtcttaacatcagacatggatgtttagcctcagtctcctgccttactgtgtgatttaacctctttgtgtcttatctgtgaaatcaggatagaaatacttgctgtgcccaactcacagtttccttgggaggtcaagatgggataatacatgtgagagtactttgaaaaaagattgaagtgctataaaaaatgtaagatttatatggttgtcagatttttttccccaaagatggtcctgaagatagtgattatcaactgtaaagacctacatggaaccagcatccctttccacactgagctcacaaagtcagcaccctttgataagtgctcacagctactatccaaaggtctaatgctgtttgcaactctcgctttttcacagctagctttgcactgggtctataatagatgcagtttccatagtcttgcaaattttgcctaaaattgctgaacaacacagccttctggcataacactacagttgaaggatgctgctgtaaaggttaaaaaggaagtttactgtgatatgatccccattagattgtcaaccctgtggttatagagaaaagggaaagcagaacagattgagagacatctgtgagagcaagcaatgctgcagtatctgaagagcctgatttctcaggcagatggggaaggattggcaaagatctgagccaaacccagcagtttttttcagtgaccaccttgaggtctatttgagtacttggatatgcccacctacataatatatgccatgctgggtctccaagtaacgaagcaatacttctctcaatcttctgcaaactctgactgcccttggggtaacacctggacccaggtgagaaatggaacttctttgcggtgactaaggtccaggagagaggctttcttcaatcatagatgatcttagatgtgaagagtaggattacaaagtgctttctactcactttcaggctgacattttccttaggggaagataccaaaaaaatacaattctttgtcaaggtaatagcatacttaatagttcagcttcttttttccaattagcagcttgaattcagagcaaaaagaaaatgaaggacaaactgctaactagtagtgaagccaggtgtcagataactggagaaagcatcagaggtatccccgggaagatcagttacctccatctctcctctaagcctgccctggctccttctactctggttgcaattaggatgaaggtgctaattacattctccaccagcagaaaggctcacttcaaaactgcccttctccaaaccgaagtacagacaccaaagccagccaccccctcatcttacaccacctccaacaggactcagagcttttttcatgtaaaaccacaggacaaaatgggattttgaaatgaagatataaggttgcttcacaagggtacaaggatcttcttatccagtgagaagtcactttccctgtgctcaaacatccttgtaaaaatccaggaggagaaaggggcacataagccaatggaaataccaagtccatggctcctttcttaatgacaaataactactttgaagaaggatccttcatgccccagggtacgggagcctaaatctctggcttgggaggaaatgaggaataatactgtagtcattcagtcctttactaaaatctcactgtttaaaaagctgctgttatcttggccaagttatttaacctccctgagtatctttctcctatattaatggaaaagaataaaaatattatcatacagcattattgtgagcatgatttgagatagaacatgcagggccataatgtcaaacatggtgtaactcaatctttttttttttttttttttttttttgctgctactgagactgagtttttcaatattagaaagtccggtgacctccttactatgtgaattccctgtgaacacaagacaagaaatctcagcctggagtatgtgcttataattggagcagggggcccagagcccagggaagggagtgcttagcagtttattcttcaacaattcctatcgtttcatctgtggaagcagtactcatcaataaatcagcaagtgacaggacatttttcaaaactgcatggaaatgttaccattttatactgttataatcatacacaaacaaaagagtatttttcccctgctctcaaagatacgttgttgacacagtttcagaagcacaaggcagaaaaactgccccaaaactcaagatgaaggctaaaattagatttttttcaaacacctcccctgacagtacctagtaatgttattgtggctgttgtaaccgtgggtgattgcctatacacacagttggtgcaatgaagagacacaatagcttaaaactaaactgtaagattatttttcaagtagcttctccaagtataatacctcagcttctagaaaaagtaatcactgctaacatttgaaaagtcaaaattctatgcaagggtctgggagattaacacgattgagcataatagctcctttcaaaccatttcctagggactaggctgcaaaaagccttaagcttgaagatggctttccaaatatattttatttattcaatgaagaaaaagactatttgaagtttccatattcctttcacatacagacacttcactgagctttaagagaagcattcgtctgtaggcgcaaaatgagtaattccccagcttctagaaaatgcaatcagtgcaaacatctgaaatgttaaaatgttgtgcaaaatgtcttttgtagagatatagaaaaaaaaaacctgaagtaaatatcattttaaactggtctcagcatttatgtttaaaaatgaatacatactcatatgcttagtatctgatgcatagatcatctccggacagcaacagcagctgcttcttgggagggtaactgaggccctgagagataacagtgggagggcgtttgttcacagtgcatccttccttggctttatattttgtactgtgtgcatgtattaatattaatctaacttaatctaaccacttaatttaattaaacatggcctcttcaataagcgagtcagctcatccatcccggtggagcagatctttctccaccatcagtactggatgctgaccttctccctggcctggacctcagggatgccgtacagcaaacttccctgacttcttttcacactgagcactaggtgggtgctgtgctggcactaaaaggatacaatgaacgtaagaggttgtctcagggccgtctgcacaggattgctagccctcccttcccaggctcctgccttactcagctttctccagggaccacaggaggcctctgcatatcttatgtaccactctggtcctttccttgttgcccccaacccctctacccttgccaacgtgcactcccttcctcaggaactctgagacacaatgaataagggagaaggtgaaagcccctcttcctctgggctctggagtaccagtgaaacacactggggccaaatcctcttctggaacacactaacaatatgaccttgataaagtcaacctcactgagcctgattctgaactcttgaaatggtggtggtcattatatcctcaggggaatggaatagagattgaatgagatcagttatgtaaaatgcccagtgttacactcaacacatagcatgtgagcagtaagtgttggatgatatcatcgtcatcattgtcagtagaagcaatggtagttctcactgccaaaacatgattgtttcaacctccgcaggcctgtacacatctccagctctctgtcctgggactcacttacacacagtgtggattagcggaaagggtgggctttccagccagaggggctttaccttgagcaagtccttaacttcttttaatgtcaatttctttaactataaagtgagaataattttataccttcctcataggagtggggcaaagattatagataatatctacaatgccctagcacctaagtgccctacatatcttggctgttttgactttactccaagggggctgatctatttactggctcctgtcaagacttgccctcttctgcctccacatctttgttcagttctgttgccctccctgccccgtcctctctttccacctccatctctggaaactttcatgcctctgtttcatctgagagattttatgacactttctctgaccacagtgaattttcccacaattgaattcgtagactgcttatcttctgtagggaaataggaggtgcaaatccagaagactccaagacccttcctctgagtcctctgttagacttattagaaatcaaggtgttaggcaacagccggcagaaaggactccggtcacatgcagccaaagagcagctcctcagtggactcactctgagctccccacacgatgatctctgtgttgcctgggaggggtcacttgccctcctgaaagtcaactccctgatgccttattcaggggtgtctcataaaataaaatggccaattggttcattgataaattaaggcacactggggcttctagcacgtggacagactgcagggccacgaggcgcgtcggctgacatccgcaggagcagctggtgtctcacctccccacgggcctggctccagctgctttgacatccattcagtgcaaatcacattgagtcactcctctctgtgaactttggatggttctgagcagcgctgcgagaggatcctgaccaagtcctcaccatgtcccacaggcccatcccgatctgactgtagtcttctaggcttttctcttgcagcagtcacctcctacctcttgctcttccccaagcccaccataatctttcctgcttctagtctttcctttacttggaatggcctttctaaacttctgtacctaatgaatcctactcatgctttaaaatccagctcaaatgttgtcccctatgaagaactttgctaacctcccagacaaagcgtgttgcccagttttctcagcagtcctctagtgtggagctttttgcgtagtacctctgttacatttacatccttctccccaacaagaccataagcatcgtggggtcaaggatgattttataacccctgagtctgccaagcatggtgtctgataaccaacacatttcattgcatgaataattaaagaaaacagaaataaatgaatgaataaacaatgctctttttgttttgttttgtttgagacagcctcattctatcacccaggctggagtgcagtggcgcagtctcggctcactgcaacctctgcctcctgggttcaagtgattctccttctttagcctcctgagtagctgggattacaggggcccaccactgcactaggctaatttttgtatttttagtagagacagggtttcatcacattggccaggctggtctcaaactcctgacctcaagtgatctgcccgcctctgcctcccaaaggaacaatgttgtttctaacaaaatacaccacctttcctggccttcccacctaaatgggttcctggaaattgttcttggccagtatgggttggtgaggggctagccagggagcagagtcatgttcgcaaaaggtgggcactcatgagagtggaagaagggaagtaagttcctatgtctagaataacactctcctagaaaacattacatctgggggatttttcatttctgtgcttcttattttcactcgcctatactcttgcacaggattgatttccaatgaaatttgataagtgatattttgttaaaatgtcctgattttttttaattattaaatagctataatcccaggcctgaaaaatcccttatccagtagctacagttgttttttgaagcaccgccaccaaaattattcccctggtaattattgagcaatccgttttcacccataagcctgtcacatgtaataaggatgcctgcctgcctgtttattttctggctaatttggtccctttacatcatgtgaccttcagtggcctgtatgcaatatgaaaatcgtcctcctaggactttctttagaaggttcacagaggtgtgctaagcataagtaatacatcagtttttaaatccaggcagagcaaacccatatcagatgtctcaggaaagcctgcaatgctgttttataaagggaacagacgagtttcttgatctttgctattctctgcaagaaaatatctcacctaagtacatcctttcgtatgcactctgtagcaggacatttacagggtcagagaaaaagacactaaaaacttacccaagctgttagctcatatttattaactgcttaatataggccagggtgcaaaggcctttatatgctttgtttaatcttcccccaaaccctgggagatttttatcccagttctgcagattagcagactgaaacacagagaagttgtaacttacccaaggtcacctggctgtggatgccagagtaagcatttattttaattgatacataataatcatacatatataggtacatagtgatattttgatacatacaatacatagtgatcccatcagggtaattagcatatttgtcatttcaaacttgtatcatttctttgttttggggcattcagtatcttctcttctaggtatatgaaaatatacaatacattattgtaactatagtcatcctatagtgctatagaacactagaacttattccttctatccagctgtaattttgtatcctttaataaatattttatcctctctcccccgtacacttcccagcctctagtattctctgttctactttttacttctttgagatcagcttttttagcttctgtgtatgagtgagaacatgcggtgtttaactttctgttcctggcttatttcacttaacataatgtcctccaggctcattcctgttgctgagaatgacagaatttcattcttacttatggatgaatgggattcctttatgtatatataccacattttctttatccattcatctgttgttgaatacttgggttgatccatatcttggctattgtgaacaatgtggcaataaacatggtggtagatatctctttgacatactgatttccgttcctttgcataaacgcccagtcatgggaatactggatcttataatagttcagtttgtagtttttttcaggtacctctgtactgttctccatagtggctgtactagaatgcattcccaccaacagtgtatacgagttcccttttctctgcatccttgccagcatttgttattttttgtgtttttgataatacccagagtatgcttttgaagtcaggtctttctggctccacagtctgaaggtgtaacactaccccaggctgcctctccatagcatgtttcctgatttctggttcaagaagactttttctaacaggtgtcattcctagatggctctcttaagatcttactccctttggcattttacaccttactcatacaatcatttttaaaaaatagcaatttaaaaaaatacagttcaagtgttcatcatatccaggcatgcaagccttttctaaatttttttaaataataaaaaagccccacagaggaaaggaggttatttgtgtcctcctgacacacacttttagattttggttaaaaagtctctagtgggtgcaaagtgaccccctttgtcactggaaacaaataggagcattctttgtgccactgtccacaaccacacagatatgtttcccaagggagctcatcaggtcttcaaacatttagcaagcatgacatgtgtaagagacagtattggagaagtaagacaagccttgctctgccgaagcttacaatccaggagctcaccccttcaaggaatttacagcctccagacagataataacattaggtccatgaaagcctacaaggcaagaagttcaggagagaaagaagtcataaccatcttggaagaatctcaacttgttttatcagaactcaaacgccaatttctcacccctagcttccctcattagcgcttattaactagtattgggaggaccaagcgaagagtaaagctagggtagcagaggccataagctaattgcaaaggacagagctaaagaaacatgctagtttcccctgagcacccaactgcatgactgaaaatggattaatttgtatttctaatggatatacaagaaacacgtgaatatgctaaaataaatttaaggtcaagcaatgcaaagtgttagtgcgtttgccttccactctcagaggcagcctctcttatttggttcttgggctgcttcataaaaagttctgtgttttttaatggcctcagcttttgggaggctcaggccacctagcccatcaggagaccaggcccgaaggatggatctgaagagtgggcaacggagagttaaaccagggctgacttcaacaggcccagtcaagtcaggggcaagcacattgtccatccactggaagacggaaaggggagaggaaggcaggccctcccgactcacaggtcacctcgcaactttgctaggcactacccaccctttagggataagtgaagtatgtggtgggcatacaaggcgcacaggggagtcattctggcaaattccaagaaggttttaagggctcccgaggcaggcaggcccagttgctgtttggagcttcctttggggtgggaggatggcgggggcagggggccggggcggtgccttaacgaggggagatgcttttaaatagctgccttccaaaaaccatcctccctgcttctttgagaagcacccagctgttgtttaccctccaggacagcaaatccggttatttgtctctctattccgtgatattataaagtaatgaatggtccattaaactaagtttgggatcccgtctccccacagccacctcctcgccggcaccctcagccggggaggccgtaggctcggctgcagcctggcagcctcagtccccctccctccaccatttccccctactccctccctctcctgcaccccctccccccggttatttgggagattagagttcattaattaaatcctgtgcttagatcgaactgtaacattattccaatcacatttatcttgcaggcggcggaggagatggcagcctcgctggaaacgcgcgggggagcctgagccggcggccggggacgcacggcgctgcgcgctccttcgccacgccgccgcgcagcccctccatcttcctgctcggcaccgggccccgcgcgcccctgcctacggggtcccgctgctctccggggctcctgccagccccaacccccggccccggtggcctccccccacccccgcccgggtccccctcctccgccacacgcgcgcgcgctcacacacacacacacacacacacacacatatatacacgccagcgagctgctggccgctcaatggaccgatttccccggtttccctgaacccagcccagcccgggatgagaaactgcaaaatggcccgggtcgccagtgtgctggggctggtcatgctcagcgtcgccctgctgattttatcgctcatcagctacgtgtccctgaaaaaggagaacatcttcaccactcccaagtacgccagcccgggggcgccccgaatgtacatgttccacgcgggattccggtgagtgcgggcctctgtgttagtgccctcgggaatttggttgatggggtgtttggggaagggaaggcgtgggggaggggtgttttggcctctccgagactctttgggccagataactgcgcggtccttccactcctctctctaattctcccttccccctccctgttattttttttttaacccaaagcccctagaagccgctgtccaaatcgatgtgattgcatttctcgtattcttcctcagcatcccttccctcatttcagaaatgggggttgggggaggctttcaggagggtgagggtggagggaaagacggtgtgtttgttcgggagggggcggcgagcagagatggacaggcgtgaggggagcgccctccccgcgccctgtccgcagactccgcgggccgggcccggggcggtgcgggcggtttaatggcgcaggcgccggactcccctcgcgccctcctccttttctcccccacgcctatcaaaggacacgcgggtttattctcaggaagcccctggggcgttctctctcgaccctttcccccgcagccaccgccccccaccagctttccgggatttctgcaattcccccgccccctgcgggaagcgagcctcggaagggccgcccaccctcgccaggtcggagtcaccgctccgcgctgggccggcctgtgaaggctccaggcgcagcttgacgccgctctgcgagagcccccgccccgctctgtgaccccgggaactctcccagcagggcctcctgacgggcaggtggcaactacaaagtgccacctgtggtccaagctgggaccgaggcgaggaacccagaggagcctcgcctggaccgaggagcggagtaggccggcggcccccgggggtccccagccaagttataggaagtgaaatcggacgtgggtttgggaaggaagaggttaaggcaggaaccacccccagactttccctgggtctccggtttcctctgccctttctccaaaaacaattctatggggctgcaaaggcgtagcgggtcaggctggcggggcggccgctgtccgcggtgctgattccctggtcctcgcagcgccgcgggctccagccctgcgcccggcgtgcgccctgctctccgcatgacggccattttatggtctctccggcacccggagggatggacaatgcagatggggttccctagttttctttttttctctcgggtgtgtgtgggagcagagggtggaccaaatgagaggggctccgggacggaacggagcccgcacgcgtaccagccgccctcgccccagccgctgcactttaatggctacctcggcttccccgagctgaggccagcacgcttgtctgtgctcatgctcctctccaggtcacaatttgcgctgaagtttctagacccgtcattcgtgcccattacgaattctctcacccaggaactccaagagaaaccttctaagtggacatttaatcggacagcgtttttacatcaaaggtaggataggaggaaaagatccaaaaggtgcttttaagaattcaagagctcaaaacaaaacaaaacaaaaacaagcaaacaaaaacatctaaaacaacaaacatctatacgccccaccctcaccatcaggtgtatctgcattgttttcttggcatgactgcacaaagcaatgatcaggaaccttctcctgtgtgtgtagtgtcctctcataaaaaggacatatcaggaccaatttgaatagcaaaaaaaaaaaaagcattccacttgggcttgattgagcaccatgatttacagctaacaagtctggcaagtactgccaaagccatctatttaaaaaaaaaaaaacagacaaaaggttagttgcaaaaagaccacccaatgcattttcatttcctcactgaaaaaaacttgaaaaatagaataaagtggtattgtttctttgaaacacacggaaaatgccataatctgtctccatcaaattactcgtgaaaatgctggcccaaatgtatgtagatatttaactatggttttgttttggttttgcctgttttcattgtctttacagcttttaacttactgtaaaggtacctaacttaattcctactaattgtagcggtttcattttatacacataagatggttttgaggttttgtttttttaggtggaagaaggatgagatttgttcaaatgtatttattctgctcagtgattctggtctactcttagcaaaccacgataactcattactccttccttcatggtgggattattttactgctaaatgggatgtgagccatctagcgtattcattagaagtgtgaatacttattttacaaaccactctatttagggagttgtgttttgatcttagcatttctagttattgctctctctctcttttaaaagtttaatctatgggcagaattaaaacaaattcagtgggtattcatggtctcatgaaaatactgttcagatgaaaagtcagcatacagtcatatgattaacattttaaaaacacttatgtttaattataaattagttcatgaaaattgatcaattctaaaactctagaagtgtttttttaataattgggttttaattcaatattaattttatggacaacccagaacgttttcatgggtagaacacattctagctttccccaaaacatgtttctaactcaataaaaaatattcttcccacactaggccatgtgacccaaatgaccagtcagaagaatatttccttctcaaaacttcgctcattttaattaattagataatctttcattaaatttttaccagtagcattttaaatctgccttacctttttaacaacttgtaagagtggtactggtaacttggggagtttcaaagatttcagttgctgttgcctctattttgaagaatgaagtcatttttaaattaaaattccaagcaacggatgatgtgcaaagcatttcatttcattcctgctacatttaggcaaaagttataagaaattcactgggtttacttaacatcggagaatctagcagcagtagcatgttaccagtctctcttgaatgttttaaatagctaaactttaagaagagatacttaattttacttaaagctcaatatgaaagcaacctgaaattagttctaagtatcagtcttgccttgtttatgtactgaattgctagaatatggaaatattttcaggatttataatagccatgttttctaaggattagatttattcaactaaattgtgtttctatataatcaagtagaaaaaactccctgtttcattattcaaaggaccttaatgagattatcatctcatttctattaaatattcagctacacccactgctattaccatcttcatattttaataatagatagtgctgtactgactcatatctatttggctcttatttggacaccactgatatttgatattctttgagcacttcagtccagtagcaaacaagtagaccctagttacaaactatgtgttactaatgtttgtgcattaatgtgagctctttcaggcctgtgtaaattgtctccctgtattttctgacacaatttgccctatacctccctgctgatcaaataagatacactcttcacgtagagcagaaaaccaaggtatggcagctaaaactgtaagttgcatttacaagcctcaaagaatacacccagaaattgactgaaagattagaatatgcggagattctgaagcagtcctcccttcaaggaccacaattatgtatgtataatcttttttggattcaatgagcctaagattccctctgaatgaaatgtcagcataagtcataagatggaaaatcaattcttctgaatggaatgcttttcatgaatttctttttattttaggcaagaaattcttcagcatgtcgatgtaataaaaaatttttctttgaccaagaatagtgttcggattggacaactgatgcactatgattattccagccataaatatgttttctctattagcaataacttccggtcacttcttccagatgtgtcacccattatgaacaagcattataatatttgtgccgtggttggaaatagtgggatcctgacagggagccagtgtggacaagaaatagataaatcagattttgttttccgttgcaatttcgcccctacggaggctttccaaagagatgttggaagaaaaaccaatcttaccaccttcaaccccagcatcctggaaaaatattacaacaatctcttgactattcaggaccgtaacaactttttcctcagtttaaaaaagcttgacggggccattctttggatccctgcatttttcttccacacttcagcaactgtgaccaggacattagttgacttttttgttgaacacagaggtcagttaaaagtccaactggcttggccgggaaatataatgcaacatgtcaacaggtgtgtatattttattacattttactcatactccaccagatggcaaatcaatgttgtaatctcttgggggtgggagccatccaattcattagttgttgtggtgagtttagtagtaattagaagaaactcatatgttttgtaatgagcgaatgaatgaatcattctagctaagaagttccatctacccacagctggtaaccaagtgtcagatggaaggattggggcttcatcagtctcccgtctctattctctgtcctctcccttggtagtaaggctatggagcagtcatggaaatcaccacaaatcaagaattttctttaaatagatagctatattccaagaatgccaatggctaaattagagacaaatcaagtggtttttctttttagaaacgatgcagttgacttaaatttatgttttgtagatgtccaaggttagcaaaacacctaaatcataaattgcacaatctgcctttataatctgatatttgagtgcaaaaacatgaagaaagtattttatgagcatgttgttatctcttgggatttgatagacagattagccagagatgcaatattttcttctagtctggtgattttcaactctggttgtatattagaatcacttgagagctttaaaaatactattgtctaggctctgcctcaagagatcctaatgtaaattatctggtgggcagggaggtggaggccaggtacttggtattttttaacaactctcctgatgattccaatatgcagtcagaattgagaaccactagcccagggcattttataaaacaagattaattgtagattttttttcttttaaatcatctggagaaaattatctcaacttcagtttcccctgtgtaagtagcctcagtgtcctaacatagccctaaatattattataagttggggtgggttctggagacctggtaaacagggaattctgaagatctttattccacaatagatttttcccatcctgtagcctcttaagatgtaagatctgtttagttgacctctcataggaggaggaattacagcctaataaactggtttgtatctcaatggtagagtgatgccataatttacagtccaaactggaacattttctttgagagaaagagggtgctattaataattacaacacagataactgacaaactgggactgtcccagttccccaggatatatggtcacctttttaagtggtgatgtagcccagctcctaagtttaaagatgaatcaactgaggtacaaggagcagaagttatttacccaaagtcactgccctaaatgagcaagactagagttagaagtcaggtctcctgccaacctgtcccatggtcttttgatctcctcattttgctccccttttgttcaatttaagtttgtctataccgaaagggttgtcagagtcattctagttccttagacaggaatagtaaaaccaagactgaacttttaaatttcatttggaaggggaaaggttcacctttgaaatcttcaagtagtgaagaagaaactgcatgtgcttagaaacttccagaaactatcctgtgtggctgcctgccacaaaagtggagttaatcataatgtttcttagccactcgggcctcaaaaaaatacatgggttcaatgaaaacgggaaggaaatacagtccacagaaacctgactaatgcacagtttcattctgcctgcatctccaatgataaatacacacaccacatagaagcctcaaatatttggcggtgtcagcaggaaggcttcagagtattaatattatttaaatatggaaggactaataactataatttattatttacacttaatgtatcttacacactttctgaatttaaaaaatttagcatgccagattgtggcatgctgaagatgggcttgggaacccctagttagaagagaaagaagcaaggaatacaattatttgcaagagagaagaaaaataaggctccacaatctttctaaaccccgaatgaagggtttatttctaggtttgagaaaggaagagacggaggagtttcccttagattaaatgacctccttcaccctatccaagaacactttatgtaagaaaagcagtcattctttttggtggccttctgttgtgtcaccgctgggtcagagccacaccactctttagaaaaacccaggggcagcttcaaaggccagcttcaaaggtgtgcaaacagtgtgatcccaggaaatcccatgctcagaagggcccaacacttggtttaatactttgctcttgcactcgaaattttcaatactttttgaaccaagactccacatttttatttcttactggatctcacaaattatgtaaacagttgtgcccagaagttgtttttggttgcctaaaatataatttcaaaacaagcactatttaagttacagtaacaaatccactacccagcccagtcagatagaccttgctgattgaaactttcaacgctgacctctgaatccaaatgtacttattgttccacaggtactggaaaaacaaacatttgtcacctaaacggctgagcacaggtattcttatgtacacccttgcatcagcaatatgtgaagagatccacttgtatggattttggccttttggatttgaccccaacacaagggaagatcttccataccattactatgacaaaaaaggaaccaaatttaccaccaagtggcaggagtcccaccagctgcctgctgagtttcagctgctgtaccgaatgcatggggaagggctcaccaagctgactctgtcacactgtgcctaagaactccaaacggaaagtgccaaatggctgtttaaaaagtgccccaaatcaaattgaatagccttcagaatagaaccctagagaatgtcttataaggattgtctgccatttaaaaggaaagatgtcttttctcttttgcactgctcttttaagagttttagcagatttagcaggacagatgcattgaagccacatggtttagacttgattgataaagggaatgttgcatttgggactatgctgctaacgaaatggtttgaagtattttcatgtttggattttaataataaactgcctctcatttttatgaggactagagctatagtttctgcagctctgctcagatagtcctcataatcagaggcctctggccaactggggcaggacctgttttgctggtgggatcagactctgaaaaatggaaacgtaaaaaactggtttgcatatctcatcttctatctatctccctatctccatctctatcaccatctcactccctccctctgcaactactccctgccctaccaccgtggagtttaataatttgctaggaatcctattgaattcgctttgcttgtatatgttgcatttgtacttgatgtgtttaaggttctgggtaactttgatgcttcatgacaaaataggcaaatcacgatggactcccttgtgattccttttttaaagaaatgcctctgatgcagtcctcaccagtccattcagtcattctacagcaagatggtccctctgtggtgagtgggatataaggcagtgcatctttcatgatcacaaagaaagcctatgttgtggatagcattgcgtctcttgatgtaggcattgttatggcaaataatagcactgtggccacatctgtaaggccattccagcctaaatttagtgtctcccataatcccaacccatgcactaggctgggtgttctctcagaatatagaggcaatgaatcagcttaagacgctgggacacacaaaggaaaaggaagaagaatatttagaagttgttatggaatcctgtgtaccctaaagtgtggtaaccatgttacccattccagctgggttaaagtggaggaggatcttggccaggccaggtgcccaggtgactagtgctgaggtgcgatcgttttccgtgtcattgtgtgcaccaccaccaatccagaaccatttgctctctttgagaacattgtagcactggatattccctctttccactgaagtcagatctatacaactacaaattaagcatttcaaaagaaaaagccattgtgcagtggcaagagttggaatccaagattatgtagacctgcgatgaaggaagtagctggccattctcattttctttatttcagccatatgagtagaaatcaaatcattcccatccctggctttttactgagcagcactttgttcttccaattcagcccaacgtctggccaagttgatgttaaattttaataagagtttcttctttccaaatgccagtcaagcatatttgttatgcatttgagtggggtagctcattcttttcctgaaatctcatctagattgcttgcaatgcgacaaataactgtttaaaaaatgtgctgtagttcagtgatgagctcattgcccctctttaggaaggtaagatcatgcctaaaattaaaccgaatatggtaaggaaagacactatcgttatgctcacgttctgcctggtcctaaacctgccttattattattttcagaaagcaatctaattagagcaacttgcatagatctagatattaactaatgaaagaaacaccaagttcaaatgtgttaccaattatgacacacattacaatataattataaggggagacattaaaaacattttgtaattcagtggtataatttgatgggtatcacaaccacaccgtgtttgttccctgtccctttgaagaggactgtactaccatcctcacactgtgctctgttgggatcactgagagattgacaactgacagaagtgtttagttggctgttcctgagcacttagttcatttggttatagctaagtgatattaatgccaatattacttgggccagattctgactctggagttttaatcccaatgtgcccattcattttcactaaatataaatgcatagacactttaaaccaagaagattaaaagaggaaaagaccagaatctctaaaaaacagtttactgttctgtagtggacaatttaaattttatctcatcataatgccaaggatttttgtttgttttttaagttcagggagattttttaaatctccttgcagtcttggctccatcttaaccttagagtgggaggactttcccatcccccaccaccgtgttatctatcactttaatgaaaactcaaaatagtgaggaaatggacttttcttcagaacttgaggggtttagagatcaggctcatctctgcttataaggaggacttcctggagatgatcccaatagatcacccttcacttttgaagaatagcagcttctagctgaccatgcaaaatctctgtttgtttttaaagactgtttcaaagattaaatctatacaaccacttttatgaccaaaaaagttgttgtgtcccaagtgtcctaattagaaaggcagctggctctcctgcagctcccaggcttgtgtagtcaagtgcagtgaactgggcagtaatcagctcaggaccattggctctttcctcctctttcagctacagacacatgccctggcttttgcattgaccttgctttgttagttctagactaatttatccttttgtcagacactttcccttttttaggatactcacaacagagtccactttcagctattggaatacattttaccataaagcccccaaggctttctacccataacaccaacacaaaaaaccaattaagttgcagaggggggaaataatcacaaacttttggcaacctgcttaatgctagaccctctgttttcactggttattctgagtgtcatatgcagatgcagatccaagggagacagggctaaatggtggtgtcaagaattcctcccacaccccaaaaattctttccaatatttgattattaaaatatctatcatttctccaccttgtgtctgtgtcttaagtgtctgtgaatattgtaaaagtgctgtatgtttagtagtgttgtgtgcctggcagtgctgactatgactactgtgccatctgtctgtgaccttgatgtcaggtacctggccatggggctaccagcaaggatgtgcaaaggaagaaccgctgcccctgccctcagcttccttatgcccgagccactacttatccgtgaatgtgagtgccaagagaaacctaatttggtggggaagccaaggaatgggagaacgttttttctgatttgagtcaaggcactaattattagacactctcagacaacaaagcggtattgacctgagatcaaaggaagcagggacaatattgtagaatgctaggacactggaaatgaagaggccttcagcttcgccagtcttgattcttgactttacaaatgagaaaatggagaaacagggaggctaggtgatttgccccagatgacactgtcaattagtggagaaattatgattcctcctctagtacttcttggtcttaccagcatcaaatgaagctgggctcacagggaaagtggtttttggtctgggatctgcagagcacataaaataagttagaaagtctataaaagaggaaaaaaggttctcctctccctcccaaaaatgacttcccaacacagaacaataaaggagatgcttgtgtggatatgcaactgtccaccaattatcacctaccttctccctgagatgaaacaaaacacgcttggtaaatcatgatttgataaataacaattaagttactggtggttcatgcttgacagctgcaatcttacccaataagctattcatcttagtaaaaccttgttttagtaatatacatgcataatttagaagttgaaggctgaaaattgttgtgttcttctccatatatatacaactttcatcggggtcccttgagttaagaaatgccttctattttataggtaatctcaacagcagactttgaaatattgtgtttggttcaatatgctaagaagatatacaaataataataacttcgtgagtcttcatgtgcaaaatgacaaactgagcaattttctgtataattctagattcttaaaaccttttttcccataattgtttgaatgcactaggcacaagtttctgtttaagcctctgcttctccctgaatgtgtagaactgtcactttgcttacaaaggggctgtgtgtttgtggctggcagcccagatagagcactctgggtgctggggattgagggcaccttggccagctgattgacctgtctggactctgtggcccaattaatcgaggccacagatcagttggtactaagcatcaaaatgattcattatgcctctctcacactccgattgctttgccacatagataacagcatttgaaatgggaaacactttagaatgtcattattgtattatatattgtcatcttatgcagtatttctgaaatttatttttattgtgatgactgattgaagacatatgtgtatgaatagatgttcctcagtgaagcctattctcttgttgttgatgacagtggcatcagagtgaagagttgttgcagagtaactgacttcagtttaaggttaccctggggttctggggttaggacccggattatgcagctgatctcccagcaaacacagctgtatgaaataagcaactcttcaaaatacaattcttgccactcattctggacctttgattcataatgtcctgggataagtccaacttacaaagattcccaggtgattcgtgtgaccaccatttggaaaccagtaatatatacatccggagtcatatataccattttgaacaaagtagctaaatgcttatctctccttgtgcgattagtttcacatgttcgttgaggttatcatgttaaatggcaatatagacacagtcttagtgattcaacaattcagctgtttcagccgaattgaccagttgctaatttataagcaaatagtaactgatcaatttagtcagaatggatgcaagcccaaagacaaggtggagagcaagctttaatatacactttgtctcaaggccagctcttcatatttccctctttatatttcaaactaagaggcagatctcaggtcactcatctttagaattggtgagaatgagaaacagggaactgaagtgattcattcagattcaatttggaagtcattcccagagcctaaaatatttatctaaggggtctgatttatcaacctcaggtagtctccaaaacacaaaggtattcaggctaaaataaaaccaatcaaaaaaggaaattcaggaggctccagttctaagactaacccagtataacaagggtgatcagttattacttgtggccttgtaccacctctgttggataatgtgccaccgtcctaatgaagctttggccagacttctttctatagctgtgcacatagaaaggctttagacaacagtgataccaaagggttcctttgattttccttctgtgtgattctcagacagttttagctctttggtgtgctgccaaatgtttaacaactggctctggaaaacagtggaacccagatttttagcacctaccaatttctatggtgtaaatactctcatctcagccaatttcaggctactaacttaatgtcaaccagctgaaaacacaacaatatgttttcaagagccagtataagttggctccaatacagcatgagccagctccagcatagcactgcctgaacaatttttaagtcagtgagtaccaaataggagaggctagcagaggctttggagggacttttaaatgtcccctccaccaagggaagcatttccatgttggttagttttactgatttttagtaaaagagcatattattggatcccaaggtgttcaaatattccacgtgactcttaggaacctctcaacagactccccagtatcttgggagattaccaactgtggcttttctaatttctaagggtgaccctccaggaaaacattctttaatttaactaccagttaaaaccatgtttggctgatcttttttaaaaaatctatacctatagttcatcacttgtttccccaactttgtcattttccctatccacttgcccctcatccttctgacacaataaaaaaaatacaggtacccacaaaacagtgcctgcaaaggagcaggggaagaacaaggcacccagtaagctcacttggctctacatatctggaaaggcactgaggttccaaggtctctaccccaccaggggacacccagtaaacatcacgctgagagtttaagttgcactcaactggagttgatttgcccttagaaaagtttccaacggtgaagaaataccacttggtaggaatatctctgggcaacttcattgctgactgggcaaactttgtaggataaggtgtcatgtgatgtaaggctggaccatgaaaaacaaaaatctactaatacacatttggcccctgcagtcccctggcattgagcaatagagcaactgtcctttctcaccactagttgtgagtgtacttccaactgagtgtttagaaatcaggtaatctggtaatccacagaacaagctttgtttgcaaattgcaaatttttctggtagaagtcattcttaggtgggcttcattaaatctttggagaggcaatgctgggaaaaaatatgcctaattcctaggacacagtgagtggccgtaagttgttatctgcatgtactaaatcaaaattagatcatgaaggaccaaatctacttccgttgctataataaaataccctacaggttctgtaaggcatttctaaactgtaaatgcttgaaacgcaagttggacattttctatactatgtgtaaaatgccaggttatacctctattttctttcttcctaatggtcattgaaatgagcttgtttctctacattgagcaagctacattttattttaaatgagtcaggtgcatgttcagatgtctgtattcccaatacattgcatgcagcctgagcacaagtatgccttcaccctctggctcttttcctgacaccaaacagagaagtccacagctacaagcacaaggggcttgacaggtaggccttgttttattatgaacaaattcaccagaaaaccattcttgaggaaccagccactcccatagcatttttagtcttagggaagaaaattggcagggaagaaaaattgacagacaatgggaaagaggtttggtcaacctgcataagtggaataaagtcattgaagtacttgcaaaaagaagagggaggtttccctctgaaggaatctagaccattttttaatatggagaataactgtaccccatgttagaagtgctctttagccatatttcaagatccagatctgaacccatactgtgcagaaaagcacaagagcgcttacagccaagagccctgggaggagttgagtaacaggctgagatccggtcaccaagcatcattagttagcactgaaattctcccaggacacaaaacaaatgtatggaaacatcgcaatacactatcatttactcacatgggacaaccacctaagtccatagcaaaactttacagatctagatgttatctcaagtcaggattccagatcaacatcctccatgtggagatgagacaactgaggttcagaaagttggagtgacttatttgcccagctagctaactggaattagagtctgggtctcccaaccactgattctgctacaccacactgtgctgcttccattagttagatggacattgacaattaattgtgaaagcattaattagaagtcaagacaaaagaatgtttgtgatatcttctctcgcttaacatactttgatttcaccattgcatttcagcattttaaagaatagtgtatcagtatagaaggaggagcaaagctctttaagagtaatgatgaaaccaaaaggtcaaaaagtagaagaatagcgaatgtaagttattaaataaatgagcaagaagtatgtgtcagggaaaataaatgcttcttatattgttaataccgtgattccctgcccgctcaccccgtcactcaacacttgatgcatttgttttggaaagtgccattttatgctgagatactggtattgaaaacttccctctttcccaactctgtcagaagttctcttgctctttggaagaagccgagggccttaacaaatcagactgacctcccttgtgacaggcagcctcgcctgcccttggaaacaagctgccagaatgtgagggccacagagacccaagagaagccagcactgctagactgaggaacttgtaaatatcttctgctttcttggtgaacaaggacagaggcaattgcgtgtatattgtgactgtagtttgtgaagaaaatgcaaccatttgcttcgacagctcctcaaatgtacttgttaagtgtgaatgtgcctgcctcattgccttgtgttccaaacacagtactgaatgcgttgtttttaaataaaccatttcgttttgctttgggaaacactgctggttgtctgtcacattcgggagagcccccacacacacatacacacacatacatgtgctaacacatactcacatttcatccagtgaagagattgaatgcttcctcctgttttatattctcagtgttttgaggtcgttggaaatttgtaggaccccagaaagggtgagcttggctgtctacagccatgaacaagcaggaaatactcaaagtccctacacataacttttccattggtcctttaaatgctaatcatgtgacaggccttaacattattaataataatacattactcttgaaagttactattacatacatcattttatttaatgaataatcaggtgagggagagatgctgagggagttgtccctgctgtgcagttaagtgacaagtcaaaatgagaactcagcctgactccctgtccagttctccttcctctgtacctttcaccccatcccaggctctccctagatcacctcctcatagaaccttccccaactgctacagtcagcctctatcccctttccctgtgctggttttcttcatatcattttttaatggtactattaacttgtttactcattgttgatctgtgtcatccactatattataagctctaccttcaacaaagcaggaaacgttgcctgtctattcccactacacccccgatgcctagaacagtgctatgagctaagtagactctcaattgatatttataggatgaatagatggatgaatgaatgggcagatgggggaaaggagagatggacagatggataaatggatgaacaggtgcaccatggagtctgtgtaacacttcaactgtttctcatcatccttcccatctttgtacccacaccacagacaccaaaagtcttagcttttctctaactgtgctgcctcagacagcattgtgaacaaaactcagtaagcatttatggactcaaggaatgaacgaatagtcctaggaattatttttctcaatatctgtgctccagtgtcaaaaatgtctcagcatatcaatgcacaaaaacacatcctgttcttgttcctggttgatttcaatttccagcaaaaggagaaactcaagttgggtaaaaaaatacagcatgattgaaagcatgccaccttcagtagacacctgagagggcctgtgggtctttaattcaaacctaaaatccttactgttcgctgcacataacactgggcaagatatgaacaggatacgaaattagcaaaatcacaatgcttatccgaaggaacttaaaaaatcttcttggggaaatggtgcaacatactacaggtgtatgtcttataaggagaaagagagagacagaaagaaaaagatgaccccctgaccccattaaatttgagtgaagacaacaaaaattttagtggtcaaatgtaatgctcagggcttatattttctgaaaactatttgcccagctgatgatccctggcaaatacacacacacacaaacacacacacacacacacacacacacacacacgcaaatggtaagttctgaaacaaaacaaaacacttcacaaacttcagcaaaacacgaaattgacaccaagtttattgcaggctctctgcctgaggctgattagtaccaattaaaattttaaagtagaaattttttttctaagaaaatacattaccatagcttaagacaaggaagaatttttttaaaagagatagaaagagagagaatccctcctcatagaagatccaacctagcccaaggctcccaggccagtaaagatgctggccttctgattccatctaagcaagagtgtgagttcgccctcggactaggttcccacacaggttgagggtccaggggtggctggtatcagcctcagctccagaatcattccccgttttgagtgtgcaattcttggtaagtgaggttggctcaaggaatatgctgctctgaacattaactcatactgctcagaatggcagagctgatcagaaacttagagattcagtcaattcaatgctctcatttccagatgaagaaactgaggcttgggaagagaaagtgacttattcagatacgctctcctagtgagcaatagtttaagtaccttatcaatttttaaagaaagaaaaagaaagttcttttttatatcaactacaaattctcaactctaaataaaagtatttaaaatggcagtctgctcatttcacttaaattaacttatttttattattactaaactattcatcaaaaaagttggaaaatgagataagcaaaagaatatttttaaaagacctaaacctttcatctgttttttctgagtgtgtatttgttctgtacaatacatactattgtgttttctagttttttctcacttaaaattatatcaacagcatcgttccatgtcattaaatattctatgataaactcagaacatgaaagcactataacttatttaacctcttattgttttaaatgtaggttctttgcaactttacattgctgtaaacagtgctctgatgaacatctttggaattaaatgtttgattatttccttagataaatcccttgaagtggattttcaagaggtatgaacaatttttgtaagaggactctttttcaggaatatttgagaaaaaactcaatgaccaaatttctaaatctttattttcctagaaaacttaccaacaagttaggagaaaaacatgcatcatcattaaggaagacttcctcaacagaaggattatgcattattgtgtactaaataaggaaaataaataagctattgttgtgtgcttcttcaattcagttaccacatctcttgtttagaatctgggagaacttcacacactcaagacagaaagcctatgcaattgcattatcattattaatcaaataagaagcacccaggaccatctggaagagatggaccttcaatacaatgatagatagctcttttccttattctgagagtatgtttattgcttactcaatcctaccaacctaataatgcttccaattcacattaagcccaagaagtcaaaatgaggaggttgaactaaacaatctacctgaggctacacaaatcctatagatcagttgtttttgttgaacctcttttaatcaatatctccatttctataggagagatgtgaatttgctttaagcaaattcaaactatgaacatacagattttcaaagcagatattattaaaggtagccaaagcagtcaccacaggcttccctatctaccactatcgctctcttaagtaaatccgtatttctgcccaactaaaaaattgtaaatatggccgggcgcggtggctcacacctgtaatcccagaactttgggaggccaatgcaggcagatcacgaggtcaggagatcgagaccatcctggctaacacggtgaaacccagtctctactgaaaatataaaaaaattagccgggcatggtggcaggcacctgcagtcccagctactcgggagaccgaggcaggagaatggcgtgaacccgggaggcggagcttgcagtgagccgaaattgcgccactgcactccagcctgggcgatagagcgagactctgtctcaggggaaaaaaaaaatcgtaaatatatttatcttcgttggccttatggcttctcttgtaactcctcagctccactgttgcagcacaaaagcagccatagatgatatataaatggatgagcatggctgtgttccaataaaactttatttacaaaaacaggcagccgccagatctagcccatgggaccacagtttgccaacccctgctttaagaaacaagctccttactgtatataaaatatttcatttgaccttcatcgtattagtctcccagggtggccataattaattactgcaggcttgggtccttatttatttatttatttatttatttatttatttattttaaaacagggtcttgctgtgtggcctaggctggagtgcagtggtgtgatcacagttcactgcagcctcaacttcccaggctcaagtgatccacccacctcagcctcccgagtagctgggaccacaggcttgcaccaccagggctggctaatttgttatattttgtagagacagggtctcaccatgttgcccagactggtctcaaactcctgggctcaagcaatcctcccaccttggcctcccaaagtgtggaattataggcgtgagccactgcgccaggcctgacttagtgtcttaaaacaatagaaatttattcccttgaggttctggaggccagaagtttgaaatcagcatgtcagcaaaattgattccctttggaagcgctgagaaagaatgcaattcatgcttttcccttgcttttggaagctgccaaacccttgtcattccttggtttttagaagcataactccagtctatgcctccatcttcacaagggttttctgtgtgtctgtgtctgctccccttctcttctaagaatttagtgcccacgcaaatccaagatgatctcatttcaagattcttactttaattacatctgcagagacccttccctctggaaaacattctgaatgtccaggtggacataatctttttggggtcacaattcaactcactacatccatttacagcaggacccctccaccaaataactcaaggattcacagagtagagctcagggaacacaattcagtgacacacagactcagatgtactctagatgtgactggtccccttcagaggtaacaaatctaccttgcaaaagtccaacagcattattgggtgatggaagttatgtcctcaaattatattttataaaactttccaatgtattagacagtaaatatatgcgcttccaacaacagattcaaaaacaaagcaaacaccacctccaagatcaacaaattctaaagatgttcctaatatataagaatttatgtcccacaccaaagacatgctcagagccaaggatattgatctcatatgagttttccagctgggctgcatgcaccacaatgaaaaaaaaaaaaacatggatagagaaaatatgaaagttgatcaacctatgacatgaagtgataagttcagaaaaatgtctaaaatgtttcagtggacacagttgttcaacaccttaaagatcaatttaaaactcattctcatctttgcagcagatatcacagatatatagatatagatttaaacaactttagtcacaaacactaatatgtctgatttagcttccagaaacctttgtgacctaatcagcaaacaaaacctattgggaactaaggtggaaatttagtcggaaatatttttctcagaaatggaacacattgaaactatctttaacaacgtgtagaaaatagaaacagtagctgattaaatgacttaaaggagagaaaagtcagaattcaacaggaaatcagaaactaaagtgtccacaagacttgtttcctccttttggaagtactatgttcttcaaaatgaaacaggaaaaagaaaattttctgccttcaagtatgtcaataccagaatggctgcttggatccttcatcctttggagacaaaagtatatgtaatgtgaagacttctaagaggacatggcctaactgatctttcctgcagatagcctagagtatccagattggaggcacaccacatcacatacccccaatctgggtgtctagaccagggaattatcctcttgtgccagggaccactacacagcttatttgttctcattctttaatccagccctagcagaaagtatttccatgtgatggatccaggaaacactaggggagggagaagcaatgatggaagagggtaagttcagtgaatctttggtacaaaaggagaagggttgggttgatctggatgttatctaaagaagagaatcatgaactacaaaccagggacaaaagatcattctcttagctctttgtaattccctgtgttccttattgatgaatacctagactgtttccatgttgcaggtagagtttcctctctgacagcccctttaagtagtctgttatgggccgggcacggtggcttacgcctgtaatcccagcactttgggaggccaaggcaggcggatcacgaggtcaggagttcgagacaagccttagccaacatggtgaaaccctgtctctactaaaaacacaaaaattagccaggtgcagtggtgggtgcctgtaatcccagctacttgggaggctgaggcaggagaattgcttgaacctgggaggtggaggttgcagtgagtcgagatcacgccattgcactccagcctgggtgatagagcaagactgtctcaaaaaaaaaaaaaaaaaaaaaaaaaacaaaaaaaaccgtggtctgttatggtctgaatgttggtgctccccaccccaatgcatatgttgaaatcttaagccccaaggtgatagtattaggagatggggactttgggaggtgattagatcatgaaggtagagacctcatggatgggacgagtgcctttataaaagggaccccagagagtgtcttgccccttccaccatgggaaagcacagagagaaggtgccatctgcataccaagaagtgggccctcaccagacaccaactctgccagcgccttgatcttgaacttcccagcctccaaaacagtgagaaataaatttctattgtttataagccaaccagtgtactgtatttgttatggccactcaaatggactaagacatggatggtcccaggatgctgcttcaggaaaatcctcttctatttatttctttctgcctacactaaccttcctcacacatagaccctaaagttccctctcacttagctcccagcttggtgcccccttctctgctgcccctgtatggatgtaactccaactccagatttcgccttgttttgtaaccaagatcactcttgagatgcacaagccacaatctcaggcttattatggtgcccccaaacctaagccaggcccttgggaatgactgaccaagcccacagcaccccaataaccaagcctatttagggagggcaatcagacaattatgagaataatcccaggagctgggaactagaaatctagcctcctctgctgccagtttggggacataaagaagcccaagggataaaataggaagtagcatggtgatgaagaaagaaaaattaaaagagaaattaactgagtccctgtaggtagggagaaagtatctgtagaaagagaggcaagaagctggagtgggcagattcctgataacgtcacagacaaaaatgcatcttcaaaaacacattcatgattttgcatttctagtggtgtttaagtcagccacatgaatttctgctgttaaaccattgagatttggggattaatttattatcaaagcataacttagcttatccagattaatacaataccttagaccttaagctttcaaaaacaaatatgaccgaaggatggtgtgcatatagaaactgccccaatttaacctattggtatccagctacagacctgacctcccctccagataggcttgcattcccctctcctattccctcctcctgaggtggaattattctcccaccctgccctaaagtccccaccatggatggcattccttgtatttgttgcttctttggattttagctcatcttgctttagatttctgctgtgtaccttgcaacccaactaatgtaagttctttgggggccaggaccacctccccaacctcttcatgtcctttactctgatgcattcctagcaggtacacagtgtttgctaaccgcacaattgctgagatgtacctgttgctcttcttacaatcatgtctgtgaagtccctgtaacagctcatcctgtatccttggcagtatcagttctatcaacagaaagtgtctcatacagtttcagaaacaggaagatggtgtgtctcagtttgtggtctttgtactaaacagactaaacagcaaattgtaggataatttactcctcagtgattggcctgtctcaggcccagccagaaagttctgttgtggttgttgttgcttttcttcaaaagtaaattgctctgagaggtcagcacacagtatgatgctaatggaatagtagagatagttttcatgagtctatatatccaaaaaatcccttcaccttccaatgttcaatcatgacacttccctcttatccctttaattagcatgttaattaacagtggctggctgggtgtagtggcccacacctgtcatctcagcactttgggaggctgaggtgggtggatcactgagccctggagtttgagaccagcctgggcaaaacggcaagaccccagcctgggcaatatgacaagacctcacctctacaaaaaaatacaaaaattatctgggcatggtggcccgtgcctgtagtcccaggaggccaaggtggaaggattccttgagcctgggaggtaaaggctgcagtgagctatgatcacaccactgcacttcagcatggttgacagagtgacaccctgtctcaaaaaacaaacaacaaaacaatggctatctctgcacgttgagatttttgtgcctttctgtattttgtaaattttctccagtgaacatttatttttatgatctgattttatgatttataaacatttattttttgccttctccctctaccccccatgcatcctctcccctgcaataaaacctgatgatttcattcagaatacagttaaagacatgctaaaattccctcaggggatatcaaggcctcgtctatggctcagtcccatctgtaagtgaccatcctgactgggggaagtactgtgatgggtgtcttcatccatcaacaaaaatgttcagccaagcaacagaagctaagcaagagaagtcaataggcccctacacttgtacagctacacacaggagtctcagtctccacagaaagttgtcccaaatcaccaacttgggctggatgccagtggtgccccattaacactccgtggtgttcctggtgggagaaccagagtgggcaccagcagctccatgaaccaggactcaaaccggggagcaggaaggaaatgtcttggtcaacacaaccccagcctactcctttccactacctagaaacaggacgccaagagatgatactttccaggtgaacaggcaccaaaagtgtgggattctcagattgagaaccagagaatatttagaatattaacattggaatttagaatggaattcagacatttcagaggctcagagaagcaaaacgatgtctcctaagtcacacagcttgcaaatgacagaggcaagactggactgtaagtcccttgagacttcaagtaaattatgtttcaataggaaagaaagaaaattcagcctatagatatggaaaaacacagcaatattagcagtgtctgtggtcatgaagtcacagagatgcaagattggactctaagtaccttgtcatgcaaaggcatgacatcacactggaaaaagcacagggacatcagaaccaagtgtgcctcaccttcctgggaccagaatcgccccctcctggttccttagcccaggatagatccactgggtcatgtttgggtacaaagagatcatatttagcagcacaaaaattggaagactgcctcctgttctagctaagaagctggatttatttataaataaacttatttataagagtctctgtcctcctaactctaagcaggatgtctgttccctcttctaaattccacttctctcccatgaccctaaggagggtcactaacctttggaacattatccagttgccccctaaatattttctactccctatagcacttaaattcacatgtatattacttattggatgccttctaggactgaattctagtcatatgtctcttttagtaaattgaatcccatcaacttgatgttctaatatttcagaatggctagaacctagtcacttaggaccttttcctcaatcccttcaaatctttggcagccagaggtgacattaatagtttttattatctatggcttttataaatcagattaatcagttgccttccaagttttttttaaggtgactgttgtaaaggagattcattattttcatattatcagatcaggggaaagcaggatccatttttcatcctattgagaaattagcttcatttcaacaatagttttgaacctagaaatgtcaatgtcttcttatcaggaaatctgtattatttcacaggcatggaaggcagcagcccatagactggaagggctggaggcctttctaaaacccctctcactgctgtgcaatattggccatgctgatagatcctgatgcagcatcagatcaaacagaacccctgagatcactcatacaatccaactcctggatgcagactgttgctgatatgccactgtcacctcatatggcctgagacattttaaaaatgcttagttgtagggcagcaattcacccctctttgcccaggacaggagcagtttccaattcttgtactggcataattatcaacatagctttatttaattcactctaatgtcatgatttgggcaatatataataaaatggtcatcctatttactgatcatctagtctgtccacttcttttcatacaaggggaaactaaaccccagggaagtgaatgacagatatcagctcccaaagggaggtgatggcaccaactgaccaccccaaccaccagccagccaggctgtactggcatcttcatgacttcatgactacagacattctgctaacattgcttgtttttccatatctataggctggattttctttttttccaattgaagtataatttacatatttaaaatacacagtttttaaatgttcagtttcacgaattttaactcccaaaacaacatacaaaatatttctgtcaatcctgaaaatttccactgggcccctttcagtcaattctcccaccttgaggaaaacatattctgatctctggccccaccaattattttgcatgttctttgacttcatataaaaggaatcatacagcttataggtctggaaggggtggtggagggaatgtaatcattataaaatatacccagttcgagccttatctgtaataaaggcccactctccagaggaaaatattttgccagcgccttataccagcttggggaagagaattcctcccactctagcctgctgtagccttcctgtcttacctaagagagaaaaaaaatgcaatccacagagctcagagcttcaagaaaatagattgggagtggtgcagccagggataggaaagagaactaaagggaaaagaatatgactgaagaaacacttgtgaagttcacctctctgagacacaggcccactaaaagactgagattcaggttagagaatgttctttctacatataccttactactacaccaaaagaatactagtataaaacaggggcatacagccgaaagagccacaaaaacatagacactgtctgagaaggaggacttacgaaagcccaaagtcaagaggacacaaaaacaaggataatacaagaagctgaagcctttggcacctgtaactacagcacatattaaacacaatccaagtcttagtcaaattaatgtaaattctcacactaaaggcctatttagctcagtttctattacccaaagcagcatgcttggctttcaagaaaaaactataaagcaaaacaaaatgaaaaaaaaaaaaccaacagaatccaaagagacaatcattaggtcagaaataatacagatgttggagtaacaaggaattttaaataactatgattattatgataaggactctaatggaaataaaagacaacatgaaagaacaaatgggtaatgggtagaaatggaaacgctaagaaagaatcaaaaggaaatgctagaaggtagaatggtggttaccaggggctagggaacggggtttggaagatgctggtaaaaggatacaaaattttggttaagtaggaaaaataaattcaagaaatctatttcacaacatagtgattatagctaataccatgtattgtattcttgaaaatcactaagagattttaagttttctcatcataaaaaataagtatgaggtaatgcgtatgttaattagctcaatttagtcatttcacaaggtatatatgtttcaaaacaacatattgcacataataaatatatgcaccttttatttgtccactaaaaataattaattatttttaaaaggaaatgctagaaatcaaaaatgctataagagaaatgcagaatgcttttgatgggttcatcagtagactgaacatagccaaggaaagaatcagtgagctcgaagataggtcaataggaacttcccaagcagaaatacaaagaaaagaaagagtgaaaacaatagtaacaataacagaacgttcaataactctaggataatatcaaatcgtacaccacatgcataattgcaataccaggagaataaaaatgtaatgaaacaggagaaatatttgaagtaacaactgttgagaactttccaaaattaatgacaccaaaccacatatctaggaaactcagagaacacgatgtttttcagttctgctactttatcactgatttttctgtcaattgttgagggggaataaaatgaccaattatgactgtatctttgtctgtttctccatttaaaaggtcaattttatgtcttaatatttaagttatctcattaggcataagtacatttaggaatattacattttttcatgaattggcccttttattattataatatatccctctttatctctggtaatactcttgaagtcactttttaatatattaataagctacccaaactttcttatgcttagaatatggatggtataggttttccacccttctacttttgatctgtttgtatcttcataaagtgtgtttcatgcaaaaatcacatagattgtgtgtgtgtgtgtttatttaatctgacaacaaaggtcttttatgtaggatattcagataatttacatttaatgtaaagtttactggaaacaatatatttgaacagatgcttcatcaaagaagacatgcagatggcaaataagcacatgaaaatatgctcaacatcattagccactagggaaatgcaaattaaaacacaatgaaatgccactacatactcatataaatggctaaaatcaaaaaggctcactaccaaatattggtgaaaacacagagaaattggttctctcatacactgctggtgcaaatgtaacatgatacagccacctcgaaaaacagtttggtagtttcttaaaaagttaaacatatatctactctatgatcttgccatcctattcctttttatttacccaagaaaataaagcatacgtctatacaaaagtttgtgcacaaatgttcacagcgtcttcatttgtagcagccagaaactgtaaataaccaaaatgcccgtcagcagatgaacggataaaacacacagtggtggccaggtgtggtggctcacgcctgtaatctcagcactttgggaggccgaggtgggtggatcaggaggtcaggggatcaaaaccatcctggctaacacggtgaaaccccgtctctactgaaaatacaaaaaattagccgggcatggtggtgggcgcctgtagtcccagctactcgggaggctgaggcaggagaatggcgtgaacccgctaagcggagcttgcagtgagcagagatcgcaccaccgcactccagcctgggcgacagagccagactcagtctcatagaaaaaaaaaacaacacacagtggtatagctctacaactgaatactacttagcaataaaaagagaggaactagtgatatgcccaataacatagatgaatctcaatgtaattatgttaagtgaaacaagccaaacctaaaagagtgcgtaaatactgcatgattgcattcacataaaatttttgaaaatacaaactagagtgacagagagcagaccatcagctgcatgagaatggaagggtaggtgaggagggttgagagggaggattacaagtggacagaaagaaacttttggaaatgatagatacattcactactttgtggtgaaggtttcatgggtgaatactgatgtcaaacttatcaaattttatactttaaatatttgcaatttattatgtcaattatagctcaataaaactctaatatattttttaagttatttggagtccagttggtttcttatccctgcctttgtgtgttctcccccggccactgcactattcctctttcctaggaaaagctcatcactttctgggttatatttgcttcaggtttctttccatccttggctctctgattttttatagtaaagtttatgtaacatacaatttataattttaacaatgtttaggtgtgcagttcagtggaactaagcacatttacattgttttgcaaccatcaccaccattcatctccagaactttgtcatcttcctgagcagaaactctgtctctgttaaacaattcccatttccctctttccccagccctgggcaaccaccattctactttttgtctccattaatttgactgctctaggtaactcatagaaattgactcatataatatttgtccttttttggctggcttatttcacttagcataatgtcctcaagattcatccatgttgtagcatgcgtcagaattcccttcctttttatggctgaacaatgttccactgtatgcaaaccacacgttgtttatccgttcatccattgatggacacttggatggcttctactttttggctactgtgtctgatgggttttttaagttatggttttgtagcttatctggcttattcttctttttaaggtggaaacagtggtattttgcaacctcctattccctgacaagaattagaagtcctctatatattgagttataatctcattttttaatctggcacaaaatcctagaattgaaaatatatccatggcctatcaaagaacaataacaaatcattaaaaaaatccataagtaataaagcctctgatttctaaaagagtttatgtttttcaatgtctgtgatgagatacctgcagcacaaataggtatgcagtcacagctgggtagaaactagaattcacatgcttcgattcttagtctagttgctctcctgcgacattgtgttgtctccatagcattagtgggagatgtaacatcaaattgagacatgatttcaccaattagtccatttttaaataagctgatatgtaagtttaacaaaattccaatagaaatttcaaccagataatggtaatagaaggcagagatcaaggcaaaggccaacttaacttgacaaaatgactattaatctcagcctgaagaataaccatcaaaaaaatccaaaaattattgaaaaacaattagtaatgaatgactagccttggcagatattaaaacatattaaaaagttactataattaaaagcatattgctagtgaatgagcagacagaaaaatcaatatgttctcttcttaacagaaattctgaaagcagatccaagaattcagtatctgattttaatgacattttaaatcagtgattaaacaaatggtattgagaaaaattggctaagcacctgggaatgaatagtaagaatgttacggtcattcagatttccatatctaaagagaggttgttgttgccattctcattgtactgttgtttttaacaccatctctcatgtttccattaatataatctgtcccattgtatttatttttttgtttcattcaccaggaaatttttaccagatcactcaaacatttggataactaatcaccttgtaaacagtcatttacccaaagtaagcaacatttttactggcaaatttttacaaattgggatttctttcataggacaagctgcaatggaaaaacgaaggaatattctttagatattttcaaaactgacatattatttacaaatattcaacaaacacaaattaaattcattctacggggccatcagtgtgctaagtcctgaggatacaaaaatgataaggctcagtcctcccttcaaaacactgtttaacccatcagttatgtcgatagtctgtctgcaatatacgtcaccaatttgctcattgttagatcacattgtttggttgtaataataagagcgcatggggtaaaaatatgaaatactagacaaaaatctaaaattccagaaaaagtattcaatatagattttgcttattagatctgtgcagagattaagcaagatcattagcatctgatacctgtgtctgaggatgttcactctagcagatttgctgaacgagatggatcctcgagtctttcccctctcgccccacaaagcagacacagctggatgctttatcattgctctaccctctccctgaacaaatctgacaagctgatcacattaggccgtgacatacaaaatatggcataattgtagactgtaatcatcacgatgatagctgacttgataagagaggtcaaatcccatttttatatcctgaattcctaaaatattgtttcgtcaaaaaaatcaatttctcatttttctagcgttaacttgaaaagggtataattgatcaagcctaaatcctttatatcacccaggactgtgtgaaaggctcagacccagcaagccacttgagttagggcccggcgaacagcagttgtctccagcatctaacacccatgggcctgaacggcttcaaagcaagaacacgttttatatcccttggttaagactgtggggaaaacacaggctcacggaatatagatgctcagctggctcatttgggttttgtggtccaatttgtggatgagatatttataaaatccggtgattacaatgccatctcattaacattcgttaaatgaaaaccacaaagtgcaggatgagaactccagtctgaggggagaggaagaagatgcatagggaggctggttttgctacctcagcacaggctaaaagagagacctgagacagaggacctctcccacttcctttaagtaagacatgtgactgaaggacaaagggagggaagaggaaggagggtagcttttctatttgtcagtttttttccatctctgtgcaaaccaaatctaagtcaaggccaacccgattttcctatgaattcaaattctccattccttgtaagatttagccaaggagacatctcctccaggatgtctgcctaggctacatttacccccatgagatctttgcatgctcaataaggctgtgtggactggactccactcacagtatttcagcacacagctgttgttcctgccttgtgactgatttctgcccctgtccctgtggggaggagtgtggcttcatagaaccaaaactacagtgtcagaaaagcctggattccagtctcagctcgggcacaaatagtcccagaacctctggtaatattcactttgcaagaaagatacaggggcagggattggtggaggggagattatgcaaattccacaatatgtatctagcaagtgggcacccaatagtagttataattattattattttattaatattgctgacttttctcttttagtcaatctcaaagtcacaggcagtttagataatgcattctatgtagactcagcaataggataattcattcagtggacagttagtaaatactaactaaatgtatgaatgatgctacatccactaggagaacatttcaaagttgggctccatcttcagtgatttatcaaatttagtgattatggctactctgtgtgcagaaactttacttaaggactctgcaaaattttcagacaggtctgtcttccttcttggtcaaatatagaaaagtctagatctccagctttcttctctcctaacaccctactgcaccctagtccccatgacaggcacaaatgcacacacacacacacacacacacacacacacacgcacacatgcacacatacacagagccaagattgactcaatggtgctgactcactaaatggggagccagaaatttcaaaggaatatgcagaggcagagactatcagacttctgccgcactgtcaaccaaaaatcctgacccatgtctgtatcttttgtgtatttgggggtgacaggcagagggccatcagccagaaagaactgtttctgtgactttaattccatggggccttttgtgcttttcttctgcagaccagtgctgcatgtataattaaccctctgcaggctgagtaactgaagcacaagactgctgtccagaagaagcagaagactgaggctgttctcctgagggccaaatagagaccaagaagaggaagttacaagtgtgaggacgattttctaaccctactagcctgaaggcaatagaacaggctgcctcggaaggaaacaaaattttccagatgatgacagaaactgttggagagattcttgcactgggaggaaacagaagtggctagcctctggggttccttaaccttctcagattcggtaagcaggcaccactgaaaggctgggaggcagaagtaaagtgagcacctttgatgcagtagttttggagccattaagaagctactgcacttccctgtttattatgtctaggttcatatgagagagtagattgttatacacagagtcacatcattctattcattaaatgctttcaccaagggacgaagaggtttggagaaaatattttgtttcatttttcagcacaagaatcttaaaagccttgacttgtcacctaatggttccttccttacagctggaatatccttaaactccttgttcgaacttccaaacacacactctccttgtccctacgtttccctctcaattccaccctatgaagcttaagtagaataagcagcagacagcctggtatgattttaaagacatccaaattcccttccacccaaaatctagctcctctacctaattgcaactgtccctgaaaaaaaaactgccatcagagacacgggtttaggtcaaagcaattattcaagaaggaccctggcaagtgcacaataagcaccataaacctagaggcacacattatttttaccaacttcctagcaaagaaagtgtcctgaaaacactggtagcaagaccagaagatctagatgagggcagggttggggaggaggccagtatgcaaggtgaaagatggatcatagagttaagagaatggcaaaaccacgagaagtatcaaagtaagggaggggagatgagtagccaacagttctggagtagagtggaaacacttcctgagtggctattctgttctgagcactgcatattgtactgaaaaacgtcatggcctttgatgtcagccaggcctgtgctcggtcactaactcagcttactcgtggtcaggtatttaagtccatcagctctggttttctcctttgttttgccggggaattaaatgagataactgtgcatgacacagtccttggcacatacatgttattcttctcaccctcccttcaccctacttctacaatttgacaagattgactcttgtctctttgctagaggttctagctgttccagacaaccacactacccaaagcacgttcaatttcaggaaggtgctaaattccactagccctgggcctcaagcaagcatccatctccagaatctcagcagaggagttctgcagccatgctcaatggtgaatactatttttctttgaaaataatgacagggaggcagagcaagatagcagaatagaaggctccaccaattgtcccccctgcaaggacaccaatttaacaactatctacacccacaaaaaaagcaccttcataagagtaaaaaaccagatgagcatacaccgtacctagtttaacttcacattgctgaaagaggcactgaaaaggtaggaaaaaccatcctgaatagtcactgccactcccacccttctccatgcagcagtagtgtggtgtggacagcatttttgcttgctgaggagagggagagtacagcaattgtgaagcattgaaatcactgctgcagaaagtggaatcagactgaactcagctgacacccacccacagacagagcatttaaaccagccctagccaggggagaatcaccaatcccaatagtcagaacttgagctcccactagcctcaccaccacaggctaaagtgctatgggtacctaaataaacttgaaaggcagtgtaggccacaaggactgcaactcctaggaaagtcctagtgctgaactgggcccagagccagaagactggcatggaacatgacttactgtgagacactagctgagacagttaaggaagtgctggaatcaccacctcccctaaccccaaactgcacagatcacagctccaaaggagatccttcttttcttctacttgtaaagaggagaggggagagtgggaaggactttgtcttgcatcttggataccagctcagccacaccatgatagggtaccactcagtcatgaggctccctttccaagccctagttcccagatgacgtttctagacacaccctgggccagaaggaaatccgctgccttgaaggggagaaaaaaaaaaaaaaaaacagccctggcaggattaatcaccagctaacaagagtccttgggccctgaataaccagcagcaatacccaggcactacatagaaggccttgggtaagactctgagactcactggcttcaggtgacagtcagcacattcccagatgtgatggctacagggtgagactctttctgcttgaaaaaagtgaaggaaaaggaaaatgaactttgtttttcacctaggtaccaggttggccacagaagggtagagaaccaagtaggctcttgggatccccaattccagaacttggctcttggatggcatttctggacctgccctgggccagaggggagcccactgccctaaagggtgagagggtgatttccaggccaggcagcatttacaagctgactaaagagcccttgggccttaagggaacatcagcagtagtctggcagtaccctccatgggcctgtggtggtgatggccatggggtgaggctcctctgcctttggaaagaggaaagaagagtgggaaggactgcatcctgtggtttgtgtgccagcttagtcatagaacaccaggtagacgtctaaggtttttgactctagtccctggctctaggatggcacttctggacctaccttgggcctgggagaattgttgccctgaagggaaggacacaggcctagctggcttgaccatctgctgactgtagagtcccaggaccttgagcaaacatacgcagcagcaaaggagtgattactgcaggccttggatgagatccagtactatgctggcttcaggtctgacccagtacagtcctagtggtggtagacacaggggtgcttatgtcactccatccccagttccagatgacttagaacagaaaaacagacttcattagtttgtgagaaagtaagggaagagaacaagagtctctgcctgataatccaggggattcttctggatcttgtccaagaccatcgaggcagtacctctgtgagtctgcaaaaaccacagccttactgggcttggggtgccccccaaaagcagatacagcttagatcacaacacccaagttctttccaatatctggaaagccttcccaagaaggatgggtacaaactagcccagactgcaaagactacaataaatacctagcccttcaatgcccagacacaggcaaacatctataaaaatcaagaccatctaggaaaaaaaaggcaccaggggccaatcctggagaaacagaaatatgtgacatttcagaaagataattcaaatagctgttttgaggaaactcaaagaaattcaagataacacagagaaggaattcagaattctcccagatctatttaacaaagagattgaaataatttttaaaaatcaatcacaaattctagagctgaaaaatgtaattggcttacgaaatatgcatcagagtcttttaatagcagaaatgatcaagtagaagaaagaattagtgagctagaagacaagctattttaaaatacacagaagaaacaaaagaataaaaagcaatgaagcacacctacaggatctagaaaatagccttaaaagggtaaatctaagagttttggccttaatgagggggtagaaaaagagatggtgtagaaagttattaaaaggaataatagcagagaacttcccaaacctagagaaagatatcaatatacaagtacaagaaggttgtagaacaccaaagaagactacctcaggcatttaataatcaaactcccaaaggtcaacataaagaaaggatcctaaaagcgcaagagaaaagaaacaaataacatacaatggagcttcaatatgtctggcagcacacttttcagtggaaaccttacaagccaggagagagtggcatggcatatttcaagtgatgaagggaaaaaaaccttttaccctaggctagtatatccagtgaaaatatccttcaaatttgaaggagaaataaaggccttcccagacaaatggaagctgaaggatttcaccaataccagacttgtcctacaagaaattctgaagggagtactttaatcagaaagaaaaggatgctaatgggcaataagaaacaatctgaaagtacaaaactcactgataatagtaagtacacagaaaaacacaaaatataacactctaactgtgatgtataaactactcttatcttaagcagaaggtctaaacaataaaccaatcaaaaataataactatgacatcttttcaagaaaaagacagtacaataagatataaatagaaacaacaaaatgttaaaaagcagggggacaaaattaaggtgtagtatcttcattagttttctttctgcttctttgttatgcgaacagtgttaagttgttatcagtttaaaataatgggttataagatagtatttggaagcctcaagataacctcaaacttacacggatacacaaaaagtaaaaagcaagaaactaaatcatattggcaaaatgcctataatcctagcattttgggaggccaaggcaggcggactgcctaagctcaggagttcaagaccagcctgggcaacagagcaaaaccccgtctctgctaaaaaataaaaaattagccaggcaatgtggcatgcacctctaatcccagctagttgggaggctgaggcacaagaattgcttgaacctgggaggcagagtttgcagtgagccgagattgagcccctgcactccggcctgggtgatggagtgagactctgtctaggaaaaaaaaaaaatcaccagagaaaatcaccttcaaatcacctgcactaaaaggaagataggaaggaaagaaagaaagaaggaagagaagaccacaaaacaaccagaaaacaaataacaaaatggcaggagaaagtcttcacctatcaataatgacattgaatgtaaatggactaaatcaaaaagatatagagtggctgaataaataatttttttaaaagacctattgatgtgttacctcaaagaaatacactttaactataaagactctcatagactgaaaataaagggatggaaaaagatattccatgccaatggaaaccaaaaaaaagagctatacttatatcagacgaaaatgcattgcaagacaaaaactataagaagagacaaagaaagtcactatgtaatgataatggggtcaattcagcaagaggatataacaattataaatacatatgaacctaacattggagaccccaggtatataaaacaaatattattagagttaaaaagagagatagaccccaatacaataatatctggagacatcaacgctccactttcagcattgaacagatcttccagacagaaaatcagcaaagaaacatctaacttaatctgcactatagaccaaatggatatttacagaatattttatccaacaactgcaggatacacattcttttccttggcacatggatcattctaaaagaacatatgtcaagtcacaaaacaagtcttaaaacttcaaaaaattaataactttatagctataaaagtgtttacatcaaaaaagaagaaaaactttaagcaacctaacaatgcatcttaaagaactagaaaagcaggagcaaaccaaaccaaaaattagtagatgaaaagagataatacagatcagaggagaaattaatgaaattgaaatgaagaaaacaacacaaaagatcaacaaaatgcaaagttggttttttgaaaagctaaaattgagaaacctttatccaggctttaaaaaaaagagagacgttccaaataaataaaatcagagatgaaaaaggagacattataactgatactgcagacatttaaaggatcattagtggctactatgagcaactatatggcaataacttggaatctagaaaaaatggataaattcccagacacatgcaacctacaaagattgaaccatgaagatatccaaaacccgaacagacaaataacaagtaatgagattaaagccataataaaatgtctcccagtaaagaaaagcctgggacccaatgactttactgctgaattctaccaaacattaaaagaagaacctataccaatcttactcaaactattctgaaaaatagagtaacagaggatacttccaaatgtattctacaaagccagtattactctgataccaaaaccagacaaagacacataggaaggaaggaaggaaggaaggaaggaaggaaggaaggaagtaaggaaggaaggaaggaagggagggagggagggagggagggagggaggaagggacagagggaggatgaaagagagagagagagaaaagaaagaaagaaagaaggaaggaaggaaagaaagaaggaaggaaggaaggagaaagaaagaaagaaagaaagaaagaaagaaagaaagaaagaaagaaagaaagaaagaaaagaaggaaagaaagaaaacaaactacaggccaatatctctgatgaatattggtgctaaaatcctcaacaaaatacaagcaaataaaattcaacactatatttaaaaagatcattcgtcataaccaagtgggatttatccctgagatagaaggatggttcaacatatgcaaatcaattagtatgatacattatatcaacagaatgaaggacaaaaaccatatgatcacttcaattgatgatgaaaaagcatttgataaaattcaacatcctttcatgataaaaaccctcaaaactgagtataacataactcaacataataagagccatatactacagacccacagctagtatcatactgaatagggaaaaactgtaaaccttttatctaagatctaaacatgacaaagatgtccacttttaccactgttattcaacatagtactggtagtccttgctagagcaatcagaccagagaaagaaataaaaggcatccaaattggaaaggaaaaagcaaaattatccttgtttgcagatgatatgatcttctatttggaaaaacctgaagactccactgaaaaactattagaattgataaacaaattcaataaagttgcagaatacaaaatcaatatacagaaatcagtaacatttctttttttttcttttttttattatattttaagttctagggtacatatgcacagcatgcaggtttgatacataggtatacatgtgccatgttggtttgcagcacccatcaactcatcatttacattaggtatttctcctaatgctatccctttcctagccccccactccccgacaggccccaatgtgtgatgttccctgccctgtgtccagctgatctcattgttcaattcccatctatgaggagaacatgtggtgtttggttttctgttgctgtgttagtttgctgagaatggtggtttccagcttcatccatgtccctgcaaaggacatgaactcatccttttttatggctgcataatattccatggtgtatatgtgccacattttcttaatccagtctatcattgatggacatttgggttggttccaagtctttactattgtgaatagtgctgcaataaacctaagtgtgtatgtgtctttatagtagcataaaaatcagtagtatttctatatgtcaacagtgaacaatctgaaaaaaaatttttaactaatcccatttacaatagccacaaataaaattaaatatctaggaattaaccaaagaagtgaaagatctctataatgaaaactataaaacattgatgaaagaaactgaaaaacaccaaaaaatggaaagatattccatgttcatggatgggaagaatcaatgttgttaaaatgtccatactacccaaagtgatctacagattcaatgcaatccttaccaaaatatcaatgacattattcacagacattgaaaaaacaatcctaaagtttacatggaaccacaaaagaccaggatagccaaaactatcctgaacaaaaagaacaagactggaggaatcacattacccaacgtctaattatacttcagagctacagtaacaaagtagcatggtactggcataaaaatagatgcataaaccaacagaacaaaacagagaacccggaaacaaatccacacacctacaatgaactaatttacagcaaagatgccaagaacatattctggagctgagaaaactggatatccatatgcggtagaataaaactagacctttatctcttgccatatacaaaaatcaaatcaaaatggattaaacacttaaatctataacctcaaactatgaaactagtacaagaaaatattgaagaaactctccaggacattggtctgggcaaaaatttcttgagtaataccccacaaacacaggcaaccaaagtaaaaatggcaaatgggatcacatcaagttaaaaaactgcacaggaaaggaaacaatcaacaaagtaaagagacaacccatggagtggaagaaaatatttgcaaactactcatctgacaagagattaataacgagaatacataaggatgtcaaccattctataggaaaaaaatctaatgatccaatttaaacacgggcaaaatacttgaatagacatttctcaaaagaagacatacaaatgacaaacaggcatttgaaaaggcactcaacatcactgaccatcagagaaaagcaaatcagaactacaatgagatatcatctcaccccagttagaatggcttatatccaaaagacaggcaataacaaatgctggcgaggatgcagagagaagagaaccctcatacactgtcagtgggaatgtaaattagtataaccactatggagaacagtttggagattcctcaaaaaactaaaaatagtgcttccatatgatccagcaatcccactgctgggtatatacccaaaagaaaggaaatcagtatatcaaagagaaatctgcagtctcgtgtttgttgcagcactgttcacaatagccaagatttggaagtaacctaagtgttcataaacaaatgaatcaataaagaaaatgtggtacatatacacaatggagtactatttagtcataaaaaagaatgagatcttatcatttgcaacaacatggatgaaactggaggtcattaggttaagtgaaataagccaggcacagaaagacaaacatttgcatgttctcacttatttgtgggatctgaaaatcaaaaaaatggaactcatgaagatagagaatagaagaatggttagcagagactgagaacggtagttgggagatgggggtgagaggaaggggaagaagggtatagttaatgggcacaaaaataattgttagaaagaatgataagacctagtatttgatagcacaacagggtgactatagtcaataataatttaattgtacattttaaaataactaagagggtataatttgattgtagcacaaaggataagtgcttgagggaatagagaccccatcttccatgatgtgacaattatgcattgcatgactgtatcaaaacatctcggctgggagcggtggcttaagcctgtaatcccagagctttgggaggccgacgcgggtgaatcacctgaggtcaggagtccaagaccagcctggccaacatggtgaaaccctgtctctactaaaaatacaaaaattacccaggcatggtggcgcatgcctataatcccagctactcgggaggctaaggtgggagagtcacctgaacctaggaggtgaggttgcagtgagctgagattgtgccactgcattccagcctaggcaacagagcgagagtgagactctgtctcaaaaaaaaaaaaaaaaaaaaaaaaaaaaaaactcatgtactccataaatatatacacctactatgtacccacaaaaatttaaaaagaaaataatgaagcactgcagatggaaccagccattatacaaacaagctaacaaccttttgggaaaccatgtcaaccagacagtgcaatgaaccagccagtggggatgaaaaggtatccacaaggtttactaaatgactgcctttcaagcagtctggactgccttgaaaaggagagaagactggcccaaagactgcataagtttaaacaaatcctcagatcatcaccacaaggctgatgtcaccaaggctgagtcaccatcatacgtgattccagaagctagggctgtaagaagtcactgcactaatgtaaaggcaagaagaacacatgccaaacataatgtctaagcagctgaaggtgctgtggcacttcctgctatttacccaggccaattatgtccggttctagaagaaaatgggatgaactagaataacttctccagtggtaaggagtctggattactaacagttcaagtataaatgtctttatccagttgaatggacctcattcattccatgaacaaatatttatagagcacctactatgtgccaggcactggtgtaggtgctgaggatacaactgtgaatcaaacataagctctgacctcttggatttcacatcttagcaaggagacagacaataaacaaagacaaaaagaaagaacaaagggagggaggcaaaatgtatcactatctaaaattaaaagctggggtcatatgttagagtgactaggtgacctgaatgacaagaagccagccatgcaaacatctgggtgacagctatgagttcttgcctcaggtttcacagaatcatgtacttttcttactgaaagggacctcagtgatcaacttcaacactccattttttatatataatgaaattgagactcaggcaagtagtatgatgtctccaaagccactctgaaaattacacagggacttccctgtttattttcgagaaggcttaaacagacaaaatgataattattcaacaaacatgtattgagccagtacttttttttttgagccctgtaatgaccactctaaattcttcagaggaaaatgagaaatacacaagtgaagtaagcagagaccccttctgtactaactgcaggcctgaccatttgatacaaagtagcaaggaggaagatttacatgggtgattcaccccagaaggctgaatagaggaggtgggatgagtaggattttgataagcaggaaaggcaggagggtgatcccatcaggagaaacatactgaatcagtgcagaaaagacaaagaatggggcggggaggactcagggagtccctaggaaactagggagtagttgaggagggatggggcatcaagactggggatggtgacacctcaaacacagagagagagttgggggaagaggagttgtaagacatataaatgtcaccaggctcaccctttgcccatcactcagtacctatcaccttccagcttgcagaggtgctaacatttgaggtactcaaactcatcttgatccttttttctcatccccttcactttttcttcacaacaggtgctgcactgggtaccctatacatatcagctcaaaataataccagttatccactcattcattcagcacttcatgcctcctatgtgtcaggcatgaagctaagcactttacaaagaatatgtcttgtaagccccacagtaaccctatgaggtaggtacttgtcattacaatcttagctagcaaactgaatctcagacaggttaaataagttgcctgaggtcactcagctggaagacagtggagctaggattttaatctctgtcttttgaactccaaagcccaagcactctctaatttttactatgaaaatattcaaatacaaaattatatagaaagcaaaatcaaactttgcctccttcatcatctagccatcagccagtcctacctgcttgaagactagaggtattttggctccctctgaaattctctttttacctcttgtcaaatttcccagacatagctcaactatggacaacttgtaccaacatttgtttcacaagctattactaagtcctccacacaggaaatatggaacgtatttccacaggtttttgagcctttgcaggtggcatagtattatcagtatcacatctttctgagacacacaaaaaaagaattggttaaaagatggaagaggaacaacagggatgaggcatgagcaagttcagaggacacatgtaagcttcatgaacaggtggtccaggcccacatatcctccacccctgttgccccagcaccatttcttcactgtgagggaggccttcaggaccagctgatgtaggagaaaaaaggctgagttgctgctgcacttcaacacactcttgggtgacccagaagactgcaatgaaggcaaatcttcccagtagtcagagcttcaggtgttgccccatcacccaccttacgtgggaagataagtggtccaaggctaggctatacaataactcatggacaatggcctagctggttattcagagggttggcagatcatttggaagactgaggacaaggaggtctaggaagaggcatgtgaataacctataggaaaagaagatgaatgataaaaatctttatattatttgttgattctcattacatagcatctctgatggaagacaccaaacaaccaagttgacagaatgaattggccaactgacttcagcctattttttttcatcagccactccagtgctgggatggtgcccgatcacatttagtagcagtgattgcacgaatgaagcctatgcatggccccagcttaccaaagctacttgctgctgctgctgctgctgcttgccactgtcatcaccaaatgtccaccctgccagcaacagagaccagtgctgagcccccagtggtggtaccgtccctcaaagagatcaaccaggcatttagtgtcaagtcaattacattggacctcttctactctgaaaagggcagcaatctatcttggctgagatagacacctgttgcagctatgtgttttccttttctgctactgctatccaatgatttgcaaggttttaatgtgccaacatgggattccacaaaacactacctcaagaccaagtgacccattttacagcagaggtagtatgacaaagggatacgtgaccatggaatccactggttctatcacatactgcactactgagaagacactggcctgaaagaccagtggcatgccctcttaatgatacagcaaaggggccattttggatattataccctggaaggatggtgcactatcatccaggactcaacatataccctaaatgacctatatgattctgtgtccccagcaggtagaatacataggtccaggaaccaagagatggaatgatttaccaatactgcaaccagtaatcctcctgagatatttgttttctatccactcaaggttaggctctttagatctaaagatcctaactcccaaaagaggaacacttgtacctggggacatagttaagagtccctttgaactttaagctacaactgccactcaattactttgggatcctcataccaagaaaccagcaataaactaaagaaatcaaccaaccaactagcaagggtaatcgaccctgcccatcaggaggggcttagcttctgctacacaatagaagaagggaagaatatgcttggcggtcaggtggtccactaagaggtctcttgatgttcccatgctcaccacttaatggtaatacacaagaatagcaaccatagactgagaagggcacagtaacttggggctcaggaccctctgggatgagggtttcattacttccagcaggtaagttacccagtgcagcacagggaatagccagagtggaggggaatgagtgtgtttaaaaaaaaaggaggggagcagtaataagccttgagaccaaactgcagcagcaagcgctgtagtatttcttactaaactttcacttgtaagctctcaggaaacgagaccaaccaaaattcaatagaaggcattcccaaacatagtgcagttattataagaagtaagtgggtttgagcgacatgagggctggatggggcacactaaggagatctccacccagatcctctcttcagcacagacacactcaaccccttgctgctaagaatactgagtgctggggactcacagctgagttactcaccagcagttacctcagttgcagggaactgcctcatccaggatgacggcccctcctaggggacagcctatggccaatgactggcttatgaagggatacagacgtctgaccacgtgcttcaaacaggattagctccaagaggctgtcccagctccaaacttctgtgtagagccacctgagaccttttttgccacaggaatacaggtcagttgcttcatcagcttacaggtgtatctcctgaaaacacctgcaataactttctgtgtcaagtctatttcaactctgtttccaagtctgtttcccagtacacaatctcaggcagcctcactcacacccattaccacatgccccaagcagaacagcactggaacagagagcaggagagtttcttgtcttggccccatctcctttaagttctctgtttattcaaacctacctaccctctcaaaacctaggtgggtaatcctccctccatgcctcattttgaatctatgagggtacagagattattaaatatacactttgcaaaacactctgttccttctaacaaaaaaggccagtaaagacagtaaggcaaggacatttctgacattttaatgtcagaaagttcacatgctggtgtcatcgtagactagtccatgagaaagggataagaagactaggtcattaaagtcaaatgactctatgaaggtcatttaacctccatgaccctgttttctaatctattttaaaagcttgctctgactaccctcaaaactttcatgagactcttcttggtaaagacaacaatacctacctcatgggtttcttagaaagactagacgaaatcatatattacaatatctggcacatggtgaacacaccacatatggctaaaatcaaatgataaaatgcctgccaatgactttgaaaactcgaacatgctacaaaaatgacaacaattatgattacagtgcaacatatttaatatataatgttttacattttttcagaggattggccttgtgtccctaacatgaatacagttcctcttttccgtttcttttaactacaaagcaactagtgcagtgtatgccatttggtaaatgcttaaaaccttttgcctgacttgcaaggcagggatcagtgagtaataccatgccttggtaacctgtcactactagaaagtgcttctgtaatgttctgtggaagagagattttttattttttgcattagactggaaaaggggagaaggagctacatttccccaaaccacctgagacatcacccaatgatttcaaatgcacttctatttgtctgaaagtattctattcaagagttacttctaaccacctgatatttcagggtgctggtgtatgtgcacccattttcctttgcattttattaaatgagaaaccaaggattgtatctagcctgtgctcaaactttttaatggaatcaaaatcctctaagattatcttaaatccggttaatatttttaagtgggacctgaatttagccaaatagctgggtggtttagaaacatgtctatctgtctccttaaagtgattccatgaatttggatctctgtgtcactgatccacttcaatgttggcatatatattatgaggaaatacgttgatagaaattcaagaaaccctcaaataagtgccagcatatctctagataaggatattttagacagccctaagctatgtattcccttcccatgagtgaggctttttcccttatccctcatctccctctctttatctattattagtgtcctaatctctgcatcaaccaaacagctttctttcccagagttatctcaaatcttactttctactgccttcctaatacacattaatttccagaactcatctcacttgcaaaacttggaatgtccctcatataaataatcactgcaaatgccaggccaggagctttgttcagcttgatttctccccagaggactgagtccaaagcatgcgctgccacctgttatcatggaaaaagttgtaatcattatagaataactacctaagataggccgggcgcagtggctcacacctgtaatcccagcactttgggaggctgaggtgggcggatcaagaggtcaggagatcgagaccatcctggctaacatggtgaaaccccgtctctattaaaaatacaaaaaattagccgggcgtggtggcgggcgcctgtagtcccagctacttggtaggctgaggcaggagaatggcgtgaatccgggaggtggagcttgcagtgagccaagatggcgccaccgcactccagcctgggccacagagcgagactctgcctcaaaaaaaaaaaaaaaaaaaaaaagaataactacctaagatactctgtagcatttggtgtttgaatgacaggtctctgtttcacagaggaaacatactacagaatttttttttcattcattcctattataaaatgttgtttcttcacattaatgaactacattgatattaccctggaagacctataagattcactcatacttgattaatttgagacactgatccccataaatcacagcagccatatctcaagctgacttttgcatagaacctgaaaacatatccttgcagagttccattccctgagttactgctctatgccagagcaacatgatggaagcattagtgctaaagttttgatagttgagtctatgttccttttcaggatagtgcctgttttttcataagatcttcactggctgaccttaaaaaaaaaatgagaagaaacagaaatttcagatgccatggaaagccaggtaaagggtcattttttagcaaaaaattcagaaactctatcagaccatcccatgtaaatggtcaattttatgtcaagcaaattcttcaatcctcttcaatgctgtgtgtaccaacatgcaaatgacccagctgtataaacagacagtggctcatgagacttaaaggtttcagggctaaagagaaacactcctctcactagcaagaccatgagatgagacacagagtccaagcacccaccatgctgctgtccaaggtcttcattcctgcttcctcctcctcttatccagtctccagatgaatttcacatctgatcctaacacacttaaataacagaacttgtaacagaatgaccatatagagtggtaattagaggcatggtcaggcagacctccattcaaatcccagcttcgccatttattagcagtatgatcaaattacttaacctaattctaagtttccctttctgtaaaatgaggatagtagcagtttctatctcataggtttgtcgtaaggattaaatgagatcaaacaggtaaagtcattgcatgtgctgtcttgtcacattcagctttgcatcccaatgatcagcagagtaatttaaaattttttacatcttgatcaaatgaataaataaatccaaaagagagagataattgaccaggaagcatgagaactatttctagtcctgtcccagacaagtgacttagcctctccagatgttatatacctcattagtgaaatggggataagaacacacagtatgggtttagtcattgcattgttatagccaacatttggccactcagaaatctagccaccaccaaaatatgccagctgcaaaattatcatcagtcttgtcttgtctgactctagtcttcaacatggctgagggtgaggcagggggatccctgagccaagaccaggaactggaatagaataagtaataattgtccttgctttgccacttaccagctgtgagtttcagtagcccattgacctttcctggcttcagtttcttcacagataaaccatgaataataatgttttccctgtattctaccccagtgagttgtagtgacacataaatgagataaagtataacataatactttgaaactgtaaagtgatataaaaaagtattattattaaatttccagcaataggttcttatcacagccatagctggaaggatgctattcaaacctagagatccatttcttctctcactctctcgatctatttctctatctatatactaactacttatctatctatctatctatccatctctgtctcactagataagggaaaagtctttcaattagagattttttgcttcagagttaatgctatatgagttgtaaattatattcaataacaatagtagtttgcattggtagagtctccttcctattgcaaagcactttaaaactgtcacaagctggaattctcacagtaaaatctgtcttgtcacattcagctttgtatcccaatgatcagcagagtaatttaaaattttttacatcttgatcaaatgaataaataaatccaaaagagagagatagttgaccaggaagcatgagaactatttctagtcctgtcccagacaagtgacttagcctctccggatgttatatacctcattagtgaaatggggataagtatagcttgcctcctaatgcagaaagctggaagggagtataaatcctcttattctatagatgaaatgaggataagtgactttatggcctggagttggtaaatacttaacataaatatatgttacaccccacaacacagtattgttttgtgtaatcagtgttcacttatttacccacgtatttgttcttcccaatgctcttcactccttcctgcatttgtttccagatatcatcattttccttctgcctgaagaactctcaaggtctgagagcaacaaagtctctcaattttgtttatctagaattgtatttcttttgccttcacatttgaaggatattttttcactggatataaaattatagttcagcttcttccctcagtaccttaaagatgccattccattgcctctagctttcatattattattctgccaattatatttttggattatttttaagcattgtattttttcacaggctttctgtaaaatttgttagaagcttattatgagagttttctttgtatttatcctttttgaagatcatagaggttttaaaactgttacttgatgcatttcaactgttttggaggatttggggaattatgtcttcaaatattgcttctatcccattttttccctcattctattctggacctccaataatacaggtattaggccttttcattgagttgagtaaattttttatacattttcctatatttacatcctttttccctttcatgctttagtgtaaatgttttctactcaccagtcttccggctccccaaaagagtaacttggacgtctaccatcacctgccaataatgaggcagtcttcctactcttccctgggaaatgtcagaacaagctaactaatgtttaaataaaatccaaagtctcatagcataatactcaaaacatccatgtttcagtgaaaactcacttacacaaataaccaagaaaatatcaacattaattttaaaataagagcaatagtcacatcactaagatgacagagatgttagaactgtataacaaagatgttaaagaatccatcataactgttcttcactgagcaattataaacatgcttgaaacaaatgaacaaatcacctcaagaaagaaacacaagataatcaaatggattttttaaaactcagtggatgagctagacaacagagtggagtgggtagaggaaagaatcagtggaacagaagataaaacaatagaaattacccaatctgaataacagaaaaaaatagactggagaaaaataaacagagccctagggatacatgggactaaaacaaaagagctaaaaatcatataattagagtcccaagagataaaagggcagtgctgaaaaagtacttgaagaaatacagcaaaaacttccaaatttcacagaagacatacaccaaagattcaggaaacatggtaaaccccaacaatataaacccaaagaaatccacactaagacaaatcatagtcaaacttctgaaaactaaagataaagaaaaaatattgaaagcacagaaagagagaaatgatatcttgcctatgtagaaaatacaactcaactggcagtggatttctcatcaaaaatgatgggagccagaaaaaaacatggcacaatatttttcaagtgctgaaagaaaagaactgtcaacccagaattccatatctgcataaaatatccttcagaaatgaaagataaatcaaggctatctcagatgaacataaactaatttttttgccagcagaactaaccaaaaggaatggcttttaaaaatcctctaagtagaaataatattagaaaagaaaaaatattggattatcagaaagaaatatacaaaaagcaaaaatatgaataaatatactaaatttttcttctactcttgatttctcaaaattatggttgacggttgaagcaaaaattataacacagtctgaagtagtattaagtaaatgtaaatgaaatattcaaaacaaatataaatggggaaggtaaggtatgtaaaacaaagtgaagtttctacacttcatttgaactggtaaaatgtcaacaatagcaggctgtgataagttatatatatgtaatataatacatagggcaactgccaaaactatataaagatataaattttaaaatgtagtagataaatcaaaatagaattttaataaattttcaagcaacacacaagatatcaggaacaaacagaaaaacagacaacagaaagcaaaaaattaagcacaatatatcaatagttacattaagtgtaaataatctaaatacatcaattaaaagacaaagattggatgagtgggttaaaaaccatggctacaggaattcgagtccaacatggtgaaaccccatctcttctaaaatgcaaaaattagccgggcatggtggtgtgtgcctgtaatcccagctactcaggaggctgaggcagaattgcttgaaccaggaggccgaggttgcagtgagccgagattgtgccactgcactccagcctgggcaacacagtgaaactctgtcaaaaaacaaaacaaaaccatgacctaactatatgctgctgtctacaagaaaaacaattcaaatattaacataatgaaataggttgcaagtaaaatgatagaaaaggatatatcacgtacatatcaatcaaagaaagcagacatggctatattaatatcagataaagtaagtttcagagcaaagaaaattaccagcaggaagaacattacatcatgataaggtcaatttaataggaagacatagcaatcctaaagagttttcaccagactcagagctgcaaaatatgttaagcaaaaactgacaggactgaaggacaaatagataagtccacaattatatttggaaatgtcaacacctctccctctctcagtaattgatagaacatctttttaaaatcagcaaggatacaaaactcaataacatcatccaccagtaggaactaatcagcacttgcagaacacaccactcaaaaacaggaagtatatacattattttcaagcatttatggaacataaaccaacatacaacatatgatgagccataaaacaaacctcaaaaaatttaaaacaattggctaggcgtgatggctcacacctgtaatcccagcagtttgggaggccaaggcgggtggatcacctgaggtcaggagttcgagaccagcctggccaacatggtgaaaccccgtcactactgaaaatacaaaaattagccagcattgtggcaggcacctgtaatcccagctactcgggaggctgaggcaggagaatcgcctgaacctgggaggtggaggttgcagtgagccaaaattgcaccactgcactccagctgagcgacaagagcaaaattctgtttcaaaaaaaaaaaaaatttttttaaacaattgcaaagatagagtgtgttatttgtccacaaaggaagcaaactagaaatcaataacaaaagtaacaggaaatcttcaaacacttggaaactaaatgatacacttctacacttcattaaggagtccaaagaaaatttaaagatacacagaactaaatgaaaatgaaaattcaatatatcaaaagatgtaggatgcagataaagcagtgcttacagggaaatttatagcactaaatgcttacattagaaaagaggagaagtttcaaatcaataatctaaactcccatcccaagaagttgggaaaagaagagcaaaataaacccaaagcaagtagaagggaggaaataaagagcagaagtcaatgaaattgaaaacagaaaagcaataaagaaaatcaatgaaacaaacagctacttctttgaaaacagatcaataaaattgacaaatctttaactaacaaagaaaaagagagacaaggtacaaattcccaatatcaggaatgaaatagtggatatctcttcagaccctgcagaaatcaaaagtataataagaaaatcatatgaataattctacaccataaattttaaagcttagatgaaatttaccaatgcctcaaaaagcacaaattagcatccagtatgaaatagattgaatagtgctttaattattaagaagattgaatttacaagtttaaaattctcaaaaaagaaatctgcaggtctaggtgatttcatcagagaattctactaattgttcaaagaattaacatcaattccttttttaatttttttatttttttaattgacaaaattatatatgtatatggggcacaacataatgttttttgttgttgttgcttttgtttgtttgtttgtttgtttttttgagatggagtcttgcactgtcgcccaggctggggggcagtggcgcgatctcggctcactgcaagctccgcctcccgggttcacgccattctcctgcctcagcctcccgagtagctgggactacaggcgcctgccaccacgcccagctaattttttgtacttttagtacagacggggtttcaccgtgttagccaggatggtctcaatctcctgaccttgtgatccgcccgtgataatttttgtgagccaccatgcccggccatactgttttgatatatgtatacattacagaatgggtaaaccaagctaattaacatatctattacctcacatacttatctttttttgtggtgagaatatttaaacatctactcttttagtaattctcaagtatacaatgcactgttattaagtacagtcaccatgttgtgcaataggtctccagaacttattcttcctaactgaaattttgtatcctttgaccaacacccctccagcccagcctccacaagcccttgataaccaccattctattttctgtttctgtaagataatttttgtagattccatatttaagtgagatcatgcagtatttttctatgtccggtttatttcacttagcataatgtcttccagatcatacagtatttatctttctatgtctggtttatttcacttagcataatgtctttcagatttatccatgtcattttatccatgtcacacacaaatggcaggatttctctcctttttaaggctgaagagcgttccattatatacatttctccgcttttttaggatgaatatgtatatatatattcacacacaaatgcatgcacacacacacacagtatatatatatatatatatatatatatatatatatatatatatatatatatatatatatgcgtgtgtgtaagtgtgtgtaggtatatatatatagtagtctcctcgttatccacaactttgctttctgtggtttcagttacccacagttaaccacagtccaaaaatattacatacaataagatatttagagagaggtagagaaagatcacatttatataacatttatttaagtatactgttatacttgctctattttattattacttactgttgttaatctcttgctatgcaaaatttataaactctatcatagatatgtatatataggaaaaaacatagtatgtatagggtttgatagtatgaaaagtttcaggcatccatccactggaggtcttagaatgtatgccctgcagataaggggggactactgtgccacattttctttatccattcatcagtcaatggatccttaggtcgattctatatcttagctactgtgaataatgctacaataaacatgagattgcagatatccctttgacatactaatttcatttcctttggatatatattcagaaatggaattgctggactatatggtcattctgtttttaattttgtgaggaatacccattttttaaataatggctgtactaatttacctttccaccaacagtatagaagtattcccttttcttcacatccttgtcaaattttgtctcttgtctctttgataatagccatcctaataagtgtgaggtgatgaattaaacaccaattctgtgaagtctcttcaagaatgagagaacaactctcaattcattgtatgaagctagtattattctgatatcaaatacagacaatgacaatataaaaaaggaaaactacagaccaatgtcctcatgaatttagatgcaaaaatcctagcaccaaaatatgagcaaatggaattcagcagtatatgaaaataattagacaccatgaccaagtggggtttattccagggataccagcccagtccaatactagaaaagcaagcaatgtaacccaccatattaacaggctaaagaagaaaaattacactattatatcaatcaatgtataaaaagtatttgacaaaattcaacctccattcatggtaaaactcttacaaaaataggaatataagagaacttcctcaacttgataaagagaatctgcaaaacccaacagctaacattatactaaatggtgaaagacaatgtgtttgcccctaatattgggaacaaaggaaggatagtcactgtcaccactcttattcaatatagtactagaagtactagccagtaaaataaggaaacaaaaaattatgcagatcagaaaggaagaaatactttgatccttatttgcatgtgtctaaatgtttatatagaaaatcacaatgaatctattttttaaaattagaactaataagtgagttcagcaaagttgcaggagacaaggtaaacacacaaaaatccattgtatttctataaatagcaatgaatatatggctatcaaaatgttaaatataatatcatttataatttttatcacccaaaacaaaattattggggaaaatgtaacaaaatatatataggacttgtatgctgaaaactatgcaacactgatgaaagaagatataaataaatgaagacacatatgtacatagattggaagactcaacatactaaaagatatcaattcttccaaaactgatatacaagtttaacataattccaaccaaaatcccagcaagatttttgtagatacacacatgattatcctcaaatatatatggaaaggtaaaagaataaaacagataaaaccattttttaaggaaagaataaagtgggaggaattagtctacctgatttcaagatactgtctagctacagtaatcaagactgtgtgacattggtgaaaagacagacgcatagatcaatggaacaaagtatggaacccagaaacatacccacatatttatacccaattgatttttcacaaagctgcggacacaattcaactgagggaaagatagccttttgaatgaatggagctgaaacaattggtcatccacaggcaaaaaataaaataaaaaaagacctaaacttcacaccttattcaaaatcaactcaaaatggatcacagacttaaatgtaatatgtacaactaaaaaactatataactacagaaaaaaatgtgagaacatcaggctctaggaccaggcaaagtgctcttagccttgaaacagaaagaatggtccataaagaaaaaattaataaattggactccatcaaaattaacaatgtttgttctgtgaaaggtcctgttaacagggtgagtaaacaagctgcacactaggaggaaatatttgcaaatcacacatctgacaaaggactactatctagaacataaaaagaattctcaaaattcaacagtaaaaaacaaaaacagtaaaaaaaaaaaaaatccaattagaaaatgagcaaaggtatgaacatttactgaaacatatacacagatgacaaaaaagcacatgaaaagctgtccaacatcattagtcactagagaaatgtaaattaaaactaaaataagacattatatacttaccagaatgactaaaatgaaaatatcaatacctaagctggcaaagatgtagagaagttgaatcacatattgctggtgggaaagtaaaatggtatactctggaaaaaagtgtgtaatttctttaaaacatgaaatatgcaactaccaaatgacctagcaactgcactactgggcatttatcctagagaaatgaagacttatattgacacaaaaacctgtacataagtgttcatagcagctttattcataagagccaaaaactggaaaccacattcaaatgctgaatagttaaacaaactgtggtacatttgtgccatggaatattagccataaaagggagcatattactcatatacacaacaaactagatggatctccagagaagatgaataaaaagccagtctcaaggggctacatactatatggttgcacttatgtaatattcttgagacaacaaattatagaaatggatagtagactagttagtggtttcctatggataatgagggaatagatatgtgagggaagtgagcatggctataaaaagtcaatgtgggggatccttatgatgatggacatgttctgtatcttgattgtattgatggtaatatcctgattgtgaaattgtacttagttttaaaagatgttttcattaaagaaaactggataaagtgtacaagggatctctgtattatctcttacaactacatgtgaatctacagttatctcaaaattaaaagtttaattaaaaattgggaagtacagagttaccagttactttgatgggaagactgtgagcgcaattttgggaagtagaaatcaagagtgcttagacatgttgagttttaggtcattgttagagacccaaatatcaagtgagcagttggatatatttgactggagttcagaaaatagttctggactgtatatgtaaacatgaatatcattagcaaataaatgttacttaatgctatggaagatctccttgcataaggaggaaaagaatatagaatcaaaacaagagaaaatctaagatcaagccttaaaaaattccatcatttagaagtcaaaggagacagaactagcaagtctggaaagactgaccagagatacaagcagaaaagcatgttgtcacaaaacaacaatcgaagggtgttttgggccaggcgcaatggctcatgcctgttaataccagcactttgggggacagaggcaggcggaatgcttgagcccaggagtttaagaccagcctaggcaacatagcaagacctcatctctacaaataataataataaaaaaaacatagccaggcatggtggcaaacctgtagtcccaaatactctagaagctgaggtgggaggattgcttgaacccaggaggttgaggctgcagtgagctatgatcatgccactgaactccagcaagaccctgtccaaaaaataaagtgtttcaagaatgcaaatgtgttgtccacaaactgtagttgagaaaatacaagataatgggaccagacttataacaatgaaattgcctagtctctgatttgcatgatctaatgcaaaaccgtctgtgcaattttaagtatttttgtttttctcatttttttttttctggtcataggagaaggagcaaaatcataggctctctttttggacctagtttcattacctcaactgacactacttcctaagaaaaacattccatttttttaaggcagggcttacacttactctccttcatgttcatttattggactcaacctctgctgtcctctgctattcttctaccctcactatctcctaccattctgtccctgctcacactgtgtgcaaacatcctaagcacatgcctcactggtttgttcttctcaatctcttttggtactctccttacatttccaaacagttccagatccttacgttttccctatttagatacactctctagattatctcaaccagtcctatggctttcacatatcacctatacacaaacaactcttaaatttctgtctctagccccaacttctcaccttgcctcctgacttatatccaattgcctgcccaatatctatctcctcttgaatgaataatagacacttatagttaacatgcacaaacacttgatttttccccattcccaacttgttcctctttgtcttccccagctttcatggagctccctaataaatggtgtgatagttttaaaacatggtcccaaattctttgatgctccaatgtcccctcctccttgaatctggaatgggcctgtgatgaattctaaacacagaatatggtagaagtgacgttatgtgacttctgaggctaggtcataaaaaaccatgcagctttttcctggttgtcttagaatgctcattctatggacacttcctaatggaatactccttcttaaagcccagccatcatgcagtaagaagcccaagccaatggagatagcaaaaatgattgttgtttaagctcactactttggggcattttgtagtgatagagaactggaactgatggaacctgatggtagctttattgtttcaatttttgagaccagaactctaaggtcatccttgacgcctttccttttctcacattccatatccaaaccattagcaaatcctgtcagctctctcttcaaatatgccccaagtctgaccaattctcaccaatctgaccaattctgaccagtatctcatctataaagtgaatctctcctaggcagagattcttggtgggaaacaacagaaactgactcgagctaattttcacagaaaaatattaggcaaaaggaacccagattactcacagaatagactgaaagggataagaaccaagttcagaaaaggatctgaaatcaatgggggttaggtgcaagaaccacagccagagaaccagctgggttggcgagctgcctctgttggacacagaacgcaccaccacaccagtgcaagttgtaggctgtctccacgccatggtctctctggcatctgacatccaaggaggtgtatcttactggttggatctagatgacatttctgagtcacagctatcaggggatggggaaaaagagagtttgggctttttggatttcacagtaagaagtaggatcctatcttccataaaaactcattttacatttcacagtgcattttctaaacacaataagtgggtacaaattctgagcagccaagtaaaagtgaatgtctaagggttgggtgaagagaaaatgaagtattttctattacaaacaggctcccaatgtatgttaatgtgttggaaatataactacattgtgaattaaagccttggattcaagtcctgttctaccacttactgaatgtgtgacccttaaccaattccttaagttcccagagattaaggtttttcatcttcaaaatgggaacaataacatcactcccacttatcttacatgctgttttgaggatcaaatgagtgtgtgaatactttgaggcactcttttagttctcattcatctttgtaacatggttgcctagcttaaggccagcctggagtaggtgttctataaatgttccataaaggtccagaattagcaataactacagaaagaatttgtaaaatgaaagccattaattaatttatgcaaataagtcatctatgtaggccagaaaagtatgatattgtcatccagggccagacttttttttttctttttttttttttgagacagtcttgctctgtcacccaggccagagtgcagtagcgcgatcttgactcgctgcaacctccacctccaaggttcaagcaattctcctgcctcagccccccaagtagctgggattacaggcatgtgccaccatgcccagctaatttttgtattttttagtagagacggggtttcaccatgttggccaggctggtcttgaactcctgacctaaggtgatctgcctgcctcatcctaccaaagtgctagaattacaagcgtgagccatcgtgcctggcccagggccattcttaagaaatatcaagtatgggaggaggccctgacactgatcatttttgccactgacctctttataaaataaatatggaaatagaagaacaacttatgcttcattatatagtacaaatttggttcacagagaaaactccttctgtgacaaattttagggactcattaatagttcttgggaattatggtaccatggggaagttatatagcttattgtctagatctctggccaatggattcaagttatcctgagaaacaagaaatatcaaactataggataactaataatacaagtgcacaatctcttaaccaaatcctttagagacagatgctttagaattgagaatttttcagatatttgaaagattttagcggtaaatattatttattacataacccccagcaaggtctggggcagcactttctcatcaaacacaacaatatttctgcacaggtatgtgtgaatactaattctaagtggaataaagactataaaaaggctgagtgcagtggctcatgcctgtaatcccagcactttgggaggccaaggtgggcggatcacttgaggtcaggagttcgagaccagcctggccaacatggttaaaccctgtatctactaaaaatacaaaaaaaaaaaaaaaaaaaaaaaatagccgggtgtggtagcatgcacctgtaatcccggccactccagtggctgaggcatgcaaatggttcaggagggaggcagagattgcagtgagccaaaattgcaccactgcactccagcctgggcgactgaggaggctatattaaaaaaaaaaagactataaatagcttcatatcagttcagttatggttacttcaacatatgaaattcaaaaaaacttctggtttttagagctttttggaattttagaaatgcagacaagaaataattcttgtactttccataaagaaattgtacttttcataaagaaatggtttttatagagatagaaaatgctccatcatgtacttttaacgtctttataagcttgaatattaatattagtctaacccttaaaattatctacataaaattacgttcacaatatcatttttaagttttatttttaattgaaaaataactgtacatatttacggagtacaacatgatgtttcaatacatgtttacattttgtaatgatcaaattagagtaattagcatatttggcaactcaaaaatttatcatttctttgtgatgagaatatgcaaaaacctcttttctattttgaaatgtataatacattgttattagttatagtcgctctactgtgcaatagaacaccaggttttattcctcgtatctaattgtaattttgggcttattgaccaatgtctcccttttcctcttccacccctttcccccaacctctggtcacaataaggtcatatgtgacagacccactactaatattacgctgaatgtagaaaagctgaaagattttcctctaagatcaggaacaaaacaaggatactcactttctcctcttctattccacatagcactggaagcctggaagtcttagccagagtagttaggcaaaagaaagaaattaaaagtatccaagttggaaaggaagaattaaattgttcctgtttgcagaaaacatgatcctatatattaaaaaaaaaaaaaaaaccctaaagactgtactaaaaaactgttagaactaataagcaaatccactgaagtttcaggatacaaaatcaacatacaaagttcagtagcattttcatacactaatagcaaaagatctgaaaaagaaatttaaaaatcctatttacaacagctacaaaaaaataaaatacttagaaataaatgtaatcaaggaggtaaaagatctttacactgaaaactataaaacattgatgaaagaaattgaagaagatattaaataaatggaaagatattccgtgcttatggcctggaagagctaacatcgttaaaatggccatgctgaaaaccaaacatcgcatgttctcactcataagtgggagttgaacaacgagaacacatggacacggggagaagaatatcacacaccggggcctgtcggcagggtggcacgctaggggagggatagcattaggagaaatacctaatgtagatgacaggttgatgggtgtagcaaaccaccatggtacatgtatacctatgtaacaaacctgcacgttctgcacgtgtaccccagaacttaaagtatcacaataaaaaataaaaataaaattttattttaagtttgaataaggcagtaaatcaaataaatcacctttaagatataatttaaaaatatacctccaggaaaaaaaaatggccatgctacctgatatggtttggatttgtgtcccagcccaaatctcatgtcaaattggaagaggggtctggtgggaggtgattggatcatgggggtggatttcccccttgctgttctcatgataatgagttctcatgagatctgatggtttaaatgtgtgtggcactcctcccttctctctttctctctcttactccaccatggtaagatgtgcttgtctccccttcaccttcaccacagccatgcttcctgtgcagcctgtggaactgtgagtcaattaaacctcttttctaaataaattaataaattatacagtctcaggtagtttttgtttgtttgttttttgttttttgggtttttttttttctgagacaaagtctcactctggtgcccaggctggagtgcagtggtgcgatctcggctcactgcaacctctgcctcccaggttcaagtgattctcctgcctcagtctcctgagtagctgggattacaggcatgcaccaccacgcccagctaatttttgtattttcagtagagatggggtttctccatgttggtcaggctggtcttgaactcccgacctcaggtgatccacccacctcgacctcccaaagtgctgggattacaggcataagccaccacgcccagcccaggtagttctttatagaagtgtgagaatggactaatacactacccaaaatgatctacacatggaatgcaatccctagaaaaataccaatgacattcttcacagaagtagaaaaaacaatcctaaaatttgtgcagaaccacaaaagatcccagataggcaaatccatcttaagcaaaaagaagaaaactgaaggtatcatactaactgacttcaaaatatactacaaagctatagtaaccaaaacagtatagtactggcataaaaacagacacacagaccagtggaatataattgagagcccagaaataaatccatgtatctacagccaactgattttcaacaaaggtaacaagagcacataaaactgatatccacatgcagattaatgaaattagactcttatcttttactacatacaaaaatcaactcagagtgtattaaagatttaaatttaagacctgaaactatgaagcttctagaagagaacacaggggaaaatctccatgacataggtctgggcaagggctttttggataagacctcaaagcacaatcaacaaaagtaaaaacagacaagtgggattacgtgatactaaaaagcttctgcacagcaaaggaaacatcaatagagtgaagagacaactaacagaatggaagaaagtatttgtaaatcagacatctgataaagagctaatatccaaaacatataaggaactcaaactacacaataacaagaaaataaataatcctatttaaaaatgggcaaaaaacttgaatagacatttctccaaagaacacatacaaatggccaacagatacatgaaaaaatgcttgaagcaagcaaaaactctctaaacatcagaaaaatgcaaattaaaaccacaatgatacatcacttcacacctgttagcttggctatcagcaaaaacatggaagagaacaagtgttgctgagcatgtggggggaaagggaacccttctacactcttggtagtattgtaaagtagtaaagtagtagagccattttgaaaaaaatagtacggagtttcctcaaaaaaactaaatatagaattaccatgtgatccagcaatctcactactggttatatacccaaaggaattgaaatcagtatgctgtagagatgtctgtactcccatgctcactgcagcattattcacaatagctaagatttggaaacaaccttagtgttcatcaatgggtgaatggattttaaaatgtagtatatatatgaaatgcaatactattctcctatttcaaaaaaatagaaaatcctgtcatttgaggcaacacagatgaacctagaggataatatgttaaatgaaataggccaggcacagagggacaaatactatataatctcattcatctgtggaaactaaaaaagttgaactcataagagtagagagcacaatattattctttttaatgtccaattcagcaaatcctgggattcaaccaaagagatcatctatttcaacctgctgcctaattcagctgattcctactaatagcatcctagccaggtagtcactaagcctttgctaaacagtcatatgagtgaagaattcactccttcatggggcaagctgctgtcctctagacaactttaatcactggaatcaaaatcagcccctctgtcacttttaccctttggtcctaactctgacttagaacaggaaaaactaacctctctgccgcgtgacagctatgcaaatatttgaagtggcagccatgcaccacattattggcctcttctctaggctaaacatttgctctaactcttccacataaagcatgatttcctcttccctcacatcctaatgacccatgtaagctctaatttattgatatctatattaaaattaggtacctagagttagattcatctccagcccagaagacagggaatttgctacctttcttgtaagttgtatgccatatttcttgtaatgcagcctaaaaatgcattatctttttttcatgccgcataatactgttgagccatttgcatttatagtaaataaatgcttccttctttctcacatgcattcttgtcacaatccaggaacctcccttgatttctatttttcagcctaaataaaggactttatattggtccttgtaaaattacatgatgtttattgtaattctaacatgcatattccattttgaatcttgattttgtctttcaatatgttagctcgagaatattatattaagtgaaataagcacagaaagacaaatgccgcatgctcacttacatgtgaaatctaaaaaagtcaaactcatagaagcagaaactagaatgatggttaccaggggctggggagtgggagtgggggaagggagacactggtcaaaggatacaaaattttagttagacaggagaaataagctatagtgatccactatacaacatggtgactccagttaataacgtacatattgtatacttgaaaatcactaagagagtagattttttaatgttcttgacacaaaaaaaaaaatatgttaggtggtacatatgataattagctcaatttagccattctgcaatataaacaaatttcaaaacatcatgttgtaaaccataaacatataaaatttttgtcagtcaaaaatataaatgagaaaaaattcttttccttcctgaaatgtgtgtgtatatatatacacacatacatatattgtgtatatattacatatataacatatatatatatacaagatatataacatatatatacaagatatataacatatatatacacacacaaaatcaatttcctactatgggtctcacccagaaagtttacaaacacagtattaaagtatgagtgagatttgaagtagcacagaggagaggagaagacaaggaaaaatcttatcccattaaggatgaataaattcctataaaacataactccttcactgaccaccgtactcaccccaccccagctacccaccactgtaagccatcccaacatgcagaaatcaatattttaagtatatatatttttaagtgattgtttggtattccaaggtattactcacttttaaaattggtcatatgagggctcagttacaaggcaagtgactctggtttaatatgtgttcatttgatggacacccagttttttaaaaaacaccaggaatacaaatacaaaatatccaggatttctgctgtttgcttatattgtgtaacaaaactaatgttaaacatgacccttgaaactgtcctggcatccttcagtcagatactatgatgagtatgatgagcccatagtaaatttcactatagttccacttggaagaaaatactttttcctaagttcttagatgggaataacttaaaatctcttcagaagaaatacccactcaaaaatctatagtaaattttaagaagtcacgtaactctgaagcgattctggctcagtgatcacttcaaattgtgactgtttttttcctctctctctgttctgtttcttttgcctttcttggtctgaaaatacagagaggtaccaaaaactcagtacataatttgaaactaaaagcaacaaacccattcattgaagtataataggtcatttggaaataaaattcattttttaaaaagagaatccttttttggaatccatttttggaatatgaagtcaatcattatagctttattccatcagaaatagctttttaaggctataactcccaaactatttggattaagaattaaaatatctaaagagcccataggaaattaacccaatcatcataaaggtcccattttaataaaaggggatccatatcaaatcagactttacatgtggaagggaccttgaagagcatctacagaaggaaatgcaggctgtcggtcacacagctagacaataataggattgggaccagaatgcaggccctgcctcttgatccaggacttgttttcactgcacccttgaccttaagagggtgatggagtagacctaattcctcctaaaccagtcatttataacttcctctgaccaacatccaatcacgtcaaaagagaacaagaaaaaacaaacaaacaaacaaacaaaaaacaggtggaaacttagtccattactttgagatgggatctgactgttttttctctttatacagaaaatggagttatcatcatcacctcactaaaatgtaaggtccatgagaacagggaccacatctaacttattcatggttctcttgcgagcacttatgtggtgacatatttttgggtgctttttatttatttgtttttgtttttactgaccactattcaaacactctattttgaggtgactccctaaagtgtgcagtacaggtgaaatgcagtgctcctttctcagtccctggcggccaggactctagtatatgctctaggagaggtcacaccctaattggctcttgtagaagtgacacgaaaacataggacagtgtggacgttactcttggctgcggcagcagcagcagagacaagtgggtcagcagaggcttcctaaaccagtctattgcagggcatgatcttggctttgttcctattcctagtctcccttggaactaggaattggttcctgcttcactctcctgccttcctatcacttcttcctcatttattcttcctgaattatttggtttcttcctcagacgttctttcctacttttttgtctaaggcagcttctgttgcttgcaaccaaaaattctaataggcacatagtaggcactcaaataagtcttaaatgaaaataaaattaatgaattattatcataatttttgtagaacacttcacaatttccaagcactctctcgtatcctaattactgcacctggtcactgtctcatttgtcttccagttaagttataatatttaacaagggcaaatccttcttgatgcaagagtcaagttaaagaaaattttaaaaatctaaaccaggcttagacgtgattttttccaaagtatgctacgcaatctcatggtattaggtaccactatgaatggtatcatttaagtaaaaaggaagccctaaaaaatgaaatttagaataccaactggggagtaaaagctggaaagtatagggcatgaaataaagtttaaaactttttgaaggaggctgggtgtggtggctcatgcctgtaatcccagcactttgggaggctgaggtgggtggatcacctgaggtcaggagttggagaccagtctggccaacatggtgaaaccccatctctactaaaaatacaaaaattagccaggcatggtggcacgtgcctgtaatcccagctactcaggaggctaacgaacgggaggtggaggttgcagtgagcccagattgtaccactgcactccagtctgggcaacagagcgagacactgtctcaaaaaaaaaaaaaaaaaacttttttaaggaaatttgatatgcaaatagttgcacagaagagatgtagaagtgataactgaaacttcaaatatgagctggcattcgccagatgaaatagcatcaaagagctctagaaaagagcactgaaacttcagataggaagttcacccaccactctaccaggtgcagtggggtagaaacggttcagtgtagaggtctagaaatgagcactgaaacttcagataggagctggcattcaccaggtacagtggaggtagaagtggttcagacgctgaaggagcaacatctacaaaggcaaaaactatgtcccttcaaaacacaaagaatatttgctttaatcatatggctctaaccaagggggggagggttgtgaattcttaaaaatatcttcacccaccccatctcactttactagaaattgaagtcaaccataacccacaccgttctccaagaattaaatgggaaattttataattacaaatggtatttcaaaacttgatgtttcagaattcccttaataattccactaccttgttatcaaattatgttgataaggtaaagaatttgacacagggcatcctatttggtctctgtcaacacgaagcccccaaaccaggtttcctcagtctgatagttggaaaacagttacaaaatccattagtccatctcagtaagggagagaggaacagccattttgtgtgcagtgacctatcctcagccccatggactatgtagcaggagatgtagtggcgaggttccttttttactctctatatctgatctccaaggagtcagtgctcaactctttccaggataaagtctgaagaacacatttcaccaataaaaaaagatagtaaatacttgagtcgtttcagagagagaaaaatatgaaacactgaagatgaagcgcttaaatctttaatgtttttggacaacacagtctatatgttttctgcataatgtatcatttctttaaactatagtattaaaaataatttcaaattgtaatgaaaagtcatttggctttaaaaccacccaggaagaggatataaaatgcgtataccaaaagactatgatgcggcttccagtgtttttctgatatagatcataataatttaaaaaggcttttgtcaggctgtctgaatacatcaaatactttctcatttctgtgtcggctgtgaagctctaactatagtggcttctctagcaggtattctccgcacaactgtgccaaatcgttctgaggacacccagattctcctccttctcaaaacagacattcctgactgggtcctagggcagggagaggggcgttggacccctactgccctctgggttctccgagcaccaggacttgttgctccggcgggaactcgcgcggatccaccggctcggcacatcctgcctacaagtagggcggcgtgtgctaggagccgggccccgggccgagtcgtccgtgccgcagcggagagctccgaccggcgcggccccaccatccgctgaccttcgcccggtccggcctggagcccggccgcggcctccctaggcctctctaggccgggcgccggttcagcgaggaccggaagcgcccgccgtccgcccttccgcctccaggccgcgggcgccaggccgggggcgggctggggacgccctgggagtgccccgggggccgccttcttccccgcaagcccggagcgggcgtcgctcccgcccccgcctcgtcttcagttcccccgtcgcttccgccgccgtgggtagaacagacccgagctgggagccaggcctgcggcccctcgaacactagccacatctggcccgccgggcctagcacggagagaggccctggggcttggcggccggggccgggagaggtcgcgcggccaaggacacccgagggcctgggctgcctccccgcccttccccgcccctcccctcggccctggaatcaatagtggccgctgacttttcacgacaattgcagctgtctaattcatcagcgaataattaaatcagaggccgccgggcctgcctggagtcggagacgaggggtcgctcctctcaaatcctgtcaaattggggagccagtgggcagcgcggagagcggacaggcctcgccctgcgccgaggctgcgagagccgcctggacccggcgccattccgagtgtagggggaagcaagcccccaggtgtggggagcaaaaggaaggaggagggcacaggcgggggccccgccgaggctggactccctcgtcagcagggccctcctggccggtgcgtggtccgggtgcccggcgtggggcagcggccgtggggcccacagacaccatcctcacgcagacttcgcgaatgtcgtggaactccatcctcgggaggcgctttgcctttgaggaagatggagaggagtcgggagaagcgcctagaaaccgcattgatttagacatcaatcctggccggctccctccgcctgccgagctgcggggccgcgccgccccgtccccgagaagcggacctagggtacgccgggctccgccgagcgggcaaagggagcggcctgcgccgccaccccgcgcccgcggcctcgacgccgcagccgccacgccaacaccgattcctcgtggccaacaggtttctcgcagccctccgagtcggcagcgccgcccgcgtccctcttccagccgggccggcgggacgccctcagagcttgtgctctctcgaggccgccgagcccactgagcccggccggggcgctggttcgcgtgggccgcggggaacaggtcccgcttctccaacgaccacggccccggcggctgcgaaacggccacctccgacccttgagtccgccagagtcgctctccctttcacatttgcaagcaaaacaacatacgtaatagtgacatcgaggcacttttccaaactaaaatgatcctaaaataatctgaatgtactgttacttttgatcgtgttaccccaaaagattagctcagattcacttggttcttttatttctttgggagatgatactcgaggaatctgaaaaaatatacgatttttaaaaacgatatgattcgcatacctatttcaacccctcggttggttttgttagtttccaaatagaaatattgccttttgaaatcggagatcatatttctcaagtttaaaatctagccaagtctttttttttttaatactccgtctgaaatttttttccatggtagctagacaattgaaattatacacaaagattttttaactctcggattttcattggaaggggacgtaaatagtttttgtactaatgcctaaacaatattggatcttcaatcaaaaagtattttcagggcaaataaatgatagttttaagagggtaataaataaaagcaacacccgtgcttagtgtctcagggcaacttgaaaacagctccactttcagggagttaaatttgtcctttttacaatcaactgcaacttttgccttcctttggaaaggacgacaaaaagatttcacgcacaacttgaccggaacaaagggacatcatgccagtttttcttttgtggggtgacaactagaagagaggaaaagtttattttaaccatacttgagttgtacttttggaaccctcctttaaagagaaaatgtgacggcagatctttcaacttaaaaatcgaagctatggggctttggggcagaagggacagatagcgcgagcaaaactgaaagtcggtgaggggaaattttgtcttcgttctcagactaagttgcctatttaaaatgaaactttcttctagagcaaaatctccgttcccctaagagctgtgcttcccccaccccttccgcaaaaagaagcccttgggtatttgcaggttcgaatcctcaaccttccctcctttgaatttcattttcccaaaagagtagaattatttctcccaccagcttctgcagcgttagcatccgaaaaatcgggtgggtggggcgttgcagaaagggtctgcagttggccccgaattcggaggaaggaaagtccctggaagggaccgcagtcccagcccccagtcctggggaccggtccggatcagaggcccggccacccacttccacccaaactcctcacgggagggggctgtggaaaccctgagagggcagggagctggagaagcaaagaaatgtacgtgtgtgtgtgtgtgtgtgtgtgtgtgtcagggaagtaagcggttcccgaagacacaaaacttcaacagtcccctatctatatgggtagaggagggcgatcaaggtcggccgccctggtgttcttttaaactagacaggtggacgcgctagcagcttagctaggcagagctgggattccggtttcccctgcagactgacactccctggagcaggtgccaaagccctttggggtggggtctcctcccctttcccctctctcaagcctgcccactctcggcgtctggacttcggaggaaactatagtttgcttcccgcagccctactcccccaccttctaatccaggtgctgggcttggggctcggagagaaccttcccccagcacgcagggctcctgtcgcttctttttcctttccctaagaggccggacaagggtgagaacaagactaacaaccccatatctctccctgccctcacgcaaagtatcttttgtcaaccaaaaagttaagggcagtcccctgccagctctgctaacctggcgttttgaattttaacaagattaacgaagaagaaggagacaaaaaaggacgcgtttggcctcaccacccagaaaaacaaacaaacaaaaactttccaagatccaactggcaaatctgaaaagtgacggtgaattgtgacagtgaatttctgagctgagaggccaaagagaattagtggggcccggcttcggttttagttttattctccctgggctcagccagcccgagctttcaaacagaagaaacctgaagctaatgaagatctcaaacagagccacaattccgagggccccttttccgccacaagcacccactgtccatctgcacgtgtaatcacagagacttgccctgtcttcattaccaggggatccgaggaaaggggagaaaattctctgtcgtgaaaaggaaccttgtgttatcactactattatttgtgtatagcgacctaagagtttccttgtcctcttcaaattcccctacaatattgaaacagcatttgttgccccattcttacaaacgtttgaggcctttctggaaaaccattaccattcaaaggctagaaaattgctctccttccttttttttttttttttttttaaaaaaaaggcaggcgcagcagcagctataacagataacaaaaactttctaccgcataatcctcgccctcagaatgacaaagaaatgatattgacttacccccgaacggatgatgtgtttgataagggagggaaatttttttttttttttgaagatttctgttgaggagctgcacagacagctgcaattcatgggcgacgctgattgccagaaacgctatggattggcatggggtctgcagctcacagatccctgatcaatacccctacactaacacgccagatggtttggggaaggacaaaaataaaatagtccaaatcaacccaccattatgtttttttgtgtgtgtattgctctgataacctagttgtagcataaatgtgttctaccctgacacaaaacctgacaagatttcgagcattggggtagaaattagcagctctcctctaccctagatttgggtcgtggttactgttgtatagtaaaaacaaagatattgggccccttatgcagattgggtttacttgtggtctgtttatctttttccgtgaataatttataaagtatctcttttaattgaatgttcacctctctgtgtgtgtctctctatacctaaaaacaattttattgtggaaaacacatacgaaaaactccgatagtaaatagttattttcctgcaattgctaactcaagttcagaatgtttttcttttacagtgcaatagcctataatagtcttgttgtcgaagctgcattttattttcatgcttcttttgacccatttaagtttctgatcttcaagaaaattggacctgtgaatgtggcatgctaagtgaatatccaggtcctgatataatgcttggtacaactgtttgtccagattctaatagccgtgaattagcacttatcataccacatttctatacagtgtgtttgtaaatcaaatgctggtggggaggggggagaagaggagtgtaacttcaaattaaaagaaaaaattccaagttgcagaacttcttaaggttaaagtatggatgctaaacaaggggcagttagaaagccactttcccttatattttcttaaagaactatagagaaagaaacatcaaaaatatttcaaaaaatacttgaaaatcgtattagtattgatactccaaaaattgtcttgaagtaaaaaacaaatattgttcctttttagaaagaaagagaaaagggcatccaaacctaattcagtaaaaattagggtgctcactaaacaagcacatccattttccttttaaatggattttgggttgaaacataaaacctcaaaccaccattataaaaacaacgtgaaaaatctgctttaattctagtccaatgaaattatacacaaagaagccaatacgatttcatgatttccctgagatcgccaatattgatcgagggaaggcggagggatggtgggagtgagggaggagggagggaggaaggaaggaagcgaggcagcgagaaaatgcaactcacctttctgctcccaggcacaccgaaatataattcccaaaagcaggtttatctcagtgtcctggcaaatgagtttaacattttgaaaatttatttaaatggcaatttatatacctaggtttctgtatggaggaagcatcagcctagggtaactggccactccttgagactgaagccagcagagcagcagaggctaccttagcactggggcatatcagacccactacttcccagttctgcttctctcctgctgtatttcagtccctgtgcactcatggaccaagaacaggttgcactctcgtgaacttttgctcaactcagtattatatttcaaacattaactgactcaaatcatcccaagtgtccagatgccatatataaggtagggagtgcgaagagagacagtaggagggggtgaggaggagaggaaaaacagagaaaccaaaatctgagttattttacctggctcctgttgtgacactagagatgtgagcaaccagaaaagtatgtctggcaaaccagaggatctgccgctttcttactcaggctttgataacacagagaagacgctatttgaaagaataattggcagcgtattggccagagctcaatgaagttgatctatgaataacgtcactgtacattcatgtgacagggtgggggtgggggtgttgctctgaagcaagaagagagaggagggcggcagaaaaggtcactgagactaagaactgttttccaaatgaatcaaacctttctctggcaccaagaagggacatacagtattccgagctctgcccttgttttcttatcaagttttctctaacagctggaagtggttgaagggggctgtcttaaggagaccccctgctcttcttttgacagctgatcaaaagaaaataggtcacgcttctcaaacttatgtccaccctgtccttaattactgtctctttaaacaaaggcaacatctgcgcaacctcagctagcttgaatcttcggaggcaaacagagcgcaacctgctttggaagaatcttgttacgtttaaggctttatgccgggtgttggcctctctgtcttcaactacccctccaccccgactcggactgcagaaatctccaactctctgtcccccagttccactcccacctccagacctggggttgccaaacaacggaaattctaggaagacgtaggtgcggtttttaaagccttggcttgtgagcgttctcaggctggccggggcgctggtcttttcagaaacaaggtttgaatatgcaggtgtcagccaggattccttgtcgtctgcccaccgccgtttctctcccgggatttgagagaagcgggagtgtgtgtgtgtgtgtgtgtgtgtgtgtgtgcgcgtgtgtgtgtctcgtgttaggagaaaggtccgtggttgccgtctcagctggtttgcttactctctgcccccaggagaagtttgctcacttgggacaccagcgaccctcctcacctccacctcaccggttctacactctccccacttctttccaagtcgctgatgcagaaagcacttggtcaccttgaaacggcagctcccggaattctagttttgttttgcaatctagcagggctcttcggaagcctcataactgagatttatgggctcaccgggtaattaaatgatgttattgtgttaactttgcatgcattactgctgcccgcgccgcccgtgggccgccggccggccgcagctcgctggcgacgagggcactacagttgctctgaccgcgtagattatgcatgtcccggcctcgggaatttaccatgcattagaatacattagcgcctgcattttaaaaggctaaactattggctcccagctagggactctcggtaagtggcttgttagtgacgagtgtttgtctatactggcacatagcggagtcttttgctcccggcttactcgcctccaggaaagctttggggtgaggcgaaggcgattgaagcaatgccccttcccccagatcgcagctgctcaggggggacacagcacggcatctttcaccgaatctctctcgctcgctcgcactccagcctccctctccccagcgacccccccaccttctcctccctccctctccttgacgtttgattccagtagcaaaggaggtaaaaaaggcaccgagccgtcagccaaacctgaaaagtgcggccccgccccctccacagccactggtagcttcccgtggaaggcccgcctcccggggcagctgcggcctcggagtggttgcgcttggcgcccgtcgggcgtggccccgccccaggtccgggagggtaggttggctgccccggcgagcggcagagcccttctggacagctcccgctcacccaaacagaagacgtcggcgccggagcgggctcggacatggcgaggctgcgagccggcccgagcggcggggcccggtgatccctccctccctccccgtcccctcccctctcccgcacgcacgccccgtccgcccccaccccgcccccaccccgggcgagcccgcccgcagcccggggcgcacacccgcacgcgcactcctctccactcactcccgcgcccgcccccactcccgcagccgagccccgccacgcgcgccttgcccgcccgccggccgcccccgccgcccccgccgcccccgggccctgatggactgaatgaaggctgcctacaccgcctatcgatgcctcaccaaagacctagaaggctgcgccatgaacccggagctgacaatggaaagtctgggcactttgcacgggccggccggcggcggcagtggcgggggcggcggcgggggcggcgggggcggcggcgggggcccgggccatgagcaggagctgctggccagccccagcccccaccacgcgggccgcggcgccgctggctcgctgcggggccctccgccgcctccaaccgcgcaccaggagctgggcacggcggcagcggcggcagcggcggcgtcgcgctcggccatggtcaccagcatggcctcgatcctggacggcggcgactaccggcccgagctctccatcccgctgcaccacgccatgagcatgtcctgcgactcgtctccgcctggcatgggcatgagcaacacctacaccacgctgacaccgctccagccgctgccacccatctccaccgtgtctgacaagttccaccaccctcacccgcaccaccatccgcaccaccaccaccaccaccaccaccagcgcctgtccggcaacgtcagcggcagcttcaccctcatgcgcgacgagcgcgggctcccggccatgaacaacctctacagtccctacaaggagatgcccggcatgagccagagcctgtccccgctggccgccacgccgctgggcaacgggctaggcggcctccacaacgcgcagcagagtctgcccaactacggtccgccgggccacgacaaaatgctcagccccaacttcgacgcgcaccacactgccatgctgacccgcggtgagcaacacctgtcccgcggcctgggcaccccacctgcggccatgatgtcgcacctgaacggcctgcaccacccgggccacactcagtctcacgggccggtgctggcacccagtcgcgagcggccaccctcgtcctcatcgggctcgcaggtggccacgtcgggccagctggaagaaatcaacaccaaagaggtggcccagcgcatcacagcggagctgaagcgctacagtatcccccaggcgatctttgcgcagagggtgctgtgccggtctcaggggactctctccgacctgctccggaatccaaaaccgtggagtaaactcaaatctggcagggagaccttccgcaggatgtggaagtggcttcaggagcccgagttccagcgcatgtccgccttacgcctggcaggtaaggccggggctagccaggggccaggctgctgggaagagggctccgggtccggtgcttgtggcccaagtctgcgcgccgagtcacttctcttgattctttccttctctttcctatacacgtcctctttcttctcgtttttatttcttcttccattttctctttctcttccgctcttcccctactttcccttctcccttttctttttctttcttactctctccttgtccctgagctttcattgaccgacccccccccatttcattcgccctcccctcaatgtgccaacctttgccctatttccgatcttcccaggtactgggaggcgggatgggggtgtgcgttttcctctaggagccctgtctttccaagacccacagaaaccaggacctgcccttattcaaaaccccatgcacttcaagtctcttttagacaacacatttcaattttccgggctgactagtctccctgtgcagaggcagttgagaggctttgctctgcagagggaaaagagctctctactctcccacccaccatataggcaaacttatttggtcattggctgaaggcacagccttgcccccgcggggaaccggcggccaggatacaacagcgctcctggagcccatctctggccttggcgttggcgcagggactttctgaccgggcttgaggggctcgggccagctccaatgtcactacctacagcgagggcagggtgtaaggttgagaaggtcacattcaccgctttgggaggacgtgggagaagagactgaggtggaaagcgctttgccttgctcaccggccgtccttgccccggtcccagcgtttgctgggatttgccaggatttgccggggctccgggagaccctgagcactcgcaggaagaggtgctgagaaattaaaaattcaggttagttaatgcatccctgccgccggctgcaggctccgcctttgcattaagcgggcgctgattgtgcgcgcctggcgaccgcggggaggactggcggcccgcgggaggggacgggtagaggcgcgggttacattgttctggagccggctcggctctttgtgcctcctctagcggccaagctgcgaggtacagccctctattgttctaggagcacagaaacctcctgtgtgggcggcgggtgcgcgagctagagggaaagatgcagtagttactgcgactggcacgcagttgcgcgcttttgtgcgcacggaccccgcgcggtgtgcgtggcgactgcgctgcccctaggagcaagccacgggcccagaggggcaaaatgtccaggtcccccgctgggaaggacacactataccctatggcaagccagggtgggcgacttcccatggatcgggtggaggggggtatctttcaggatcggcgggcggtctaggggaacaattcgtggtggcgatgatttgcatagcgcgggtcttgggatgcgcgcggttccgagccagcctcgcacagctcgcttccggagctgcgagctcaggtttccacccccgatcccccgggctttcctcgcaccgctgagcccagcttgtggggtgcactcgaccaacgcccgacagggctggggaatgtgacaggcagcaggttcacccgggcttggggagggggagtttccgctttgacagcattttcctttgccgtctgctggtggattcctattcccagtcggtaatcgccccgcagtgttgatctaagaaggtaaagaaaactaggtttccctgcaaagagcctcccccaaatcggcggactccggatactttgagtggatttagaaatttatgtaatctttctcctttagtttatttttcatcctctcctacagttttctctgatttgctgttggttcggggcaagataaagcagccagtagagagcgataataatagcggcgggaaatgaactggagactggctgacagttcttaacattttgtcatagatccccccgaatgtcccaggctgtctctggtgggttttagtacccgccggcttcttgggcaccggggaccagaaggaacttggcagctggtcttaggggtacagttaaaggcaggatgacagctattctcctgctcatctcagagcgctgccgccccctcatgccggtcgcgcaaagaacacagcttttaaaaaacacgtgccttctgcccatataggtctgaaagtgatgaggaaagtaatgcttcgcctattagcgagtttcagcttttaaaatgatcccaagcgttgctgagatgagaaagcgtggcatcccgggggtcctcagccccacccgcgcccatggtgcaagtctgcagggacaggcccgggacagcactgcccacgctgctagattttccgcagaggatcgctgaagctgccttcgtgggagacagaatgcctcctccagcgagtggaaaaggcctgctgaggaccccgctttgctcgagcattcaaatgtgtgtctgttttattaccctgggttgaaaagggacaagagctttagcctttttatctggccattttatcagcaactacaagtgtgttgagtggttattattacataggaggcttttcagtttggggtcagtagatcagtctcttcagacactgatgcagaagctgggactggtaagtaggtattatgtgctcggagcgctaggggacaggagcaaatggagaagaaaagcggaggctttctccgcccggagtatcgatcggaatccccgccggtacgccgcagagggccctcgccgttgggccccgggggtttaacaagcccagccgctccgcaggcggctcggccggactctcagaccggtgcctggaagacaccgtccctgcccccctcccgccaaacctgcctcttctctttctctcataggttataggttccctttctctctcattttggccccgcccccgggtcctgccaaacagccaagcaggccggggtttagggggctcagaatgaagaggtctgatttggccagcgccggcaaagctcacccttaggcgaggtcacaacagaggcaggtccttcctgcccagcctgccggtgtagtcacagccaagggtggcacttgaaaggaaaagggagaaaacttcggagaaatttagattgccccaacgttagatttcagagaaattgactccaaatgcacggattcgttcggaaagggcggctaagtggcaggtggttgcaaccccgcccggtcgggccttcgcagaggttccccaagaccagcccttgcagggcggttttcagcaacctgacaagaggcggccaagacaaatttctgcgggttcgagcacacactctcgggcgttgggccccagagacctctaaaccaagcacaaacaagaagggagtgagagaacccaggctagaacttgcacgggcatcccactgaggaaaagcgaggcctcggtggcaggcatgttttcttccgacgcccgaaaatcgagccgagcgcccgactacatttactgcagaggtttccgcctccagtgagcccggatcccccagcggcctgcccggagctggtctccagtccccgccgtagtccgacgcacggccctctcctggcagcaagctcccagcggccagtctgaagccaattctgttcaggcggccgagggcccttagccaacccaccatgatgtcgcctgggccacctgatgcccgcagcggcgggacacggcccgggcagtgcgcagtggctcctgctaggggcaccgcgtgcgtgcttgtctcccgctgcgccggggacgtccttgggtgacacgggccgctgggcacctcccaagccgaggaaacggacccccttcgcagagtctcgcgcccaccccccaacctcccacctcgtttctcgctgctagggctcccgactcagcccacctctcctggcggtttagttagggatcagagctggagaggctgaacgcaacccgtgccagtacggaacagacgatatgtttgcctgctagctgcttggatgaataattgaaaagttcgctgcagtctgtgcttcgtcaagtcccgggtgccgggagaacaccttcccaacacgcatcagggtgggcgggagcgggcagaggaggcgggacccgagggaggagagtgaacccgagcaggagaagcagcccaggcagccaggcgccctcgatgcgagaggctgggcatttatttttattccaggctttccactgtgtggttatgtcactttctcaaacaaatgtgtatatggagggagatcgatgctgataatgtttagaagattaaaagagcattaatgctggcaacaataacgtaaacgtgtggacccagatttcattgatctggaacttgatccggcgcgtttccagtaagcccgacggcgcgctcttcccagcagagcgctcaccagcgccacggccccgcggttttccagcggtgccgcttcgccagctctgcgcgggttctcccgtctgaccgcagctcctcccccgcgaggccccagcccgccttacttccccgaggttttctcctcctctcgcggggctctctgccctctgcaccccctcccccgacctctgcaccacccgcccctgtgcgcacacaccgctacttgcgcttccggcgatccgcctgggcggctgggtccgcgaagccaatgcgctgaacggtgcccgagtcttcctaactatcctgtgcttggccgttgccactgggccctggtgactaagcccaagtttgaaaatgacgtggctaaagctgcctgctaacggcagagcttaatcagccgcagatcccctcctatcctcatcggttctcgtactaaaaaggctcacgcgcagactttttacgcaggtgcattcgttggacaattaaacgtggccctagtaacaaaagcctgagcttcatccctccgagtagcaggctctgcgctggactggtcgggtctaacagggagaatcttgtgtcctaccttggctgggacaggaagtaagagaagcaaactggggaacccctgccccaccccttcccaccccctggacgtcctgggccgaggcccgggtcactggcccatcgcgggtaaggaggtgtcctgtggaacacctgcattgactggaaaagaaagaactttaaagctcttccttcccgcttgtgggggacaccaccacaccctgccaaccactcccctggccaaatggtggcttgtttttccagaaggagcactaaggtgaattttatggaaaaaaaataaaagatcagggacctaagtgggagtaggatgagaactaattcttctgggttttttttttttttttttgaaattatgaatcccacctgttgaagaaggctgagcttttccaacagcgggtatcaatcgggagggaaagcagtgttttccagccctctccaagaacagtaattaataagaggaaggaaaagagagatgggaaagcaaatcgtgcattgttctgctttgagttgaggcagagggtaggctggtgtttcttcctcatcttcccactagtgttcttccttaaagaagggagctttggtacaccaccttggttcctagtcagaaagtgccctaccggacccttttaaactacaatgagatagctgggtaatcagatatgtaactaaggaggagagcaggtggtttccctttggtctggcggacaactggctccctccccacagcccccacttgaaagactcctaggccctgggaggggcgagtgggcctttagaggatagaatcatagactctctcctactcccatcttagaattccaagattgggcaggattcctggtgaatggtgaggtctgggcaaaggataaactgattaccccagattctctgtccctacaaggcaccagcagctgcttcactctccttttgagccaggtctgccctgaggtaacagtaccctaggccagttttaccatcccaagtgccagacttcagccctgagggaaggagagccagcctctcctgctgtcttcaaaccaaggcttcattttacagtcacccccgatatgagagagagcctccccaccaggttttctggcctttagacacttctcttcaaagaagagaccagaggaacaggactgaaaaactctcaggaagaaagtcctgggctccacactccatggctagtggctggatttggcagaaactgtcttcatgaaaagtggtatcatggagggggatccctggagcaaggaagacctcaagggagaagcagagagatttagtttctgggttcttgccaaaggaagggaaattaggagggaataaatagaaataattgcctgtataaagggccctggggaggagggtgaagacagaggcaccctaggccttaaacttcatctagactccctgggctgtgctgacttctgacccttttagggacctttgtttttgctgacttgggaaaagttgcttcctccagggagacaactcttcttagaggggagagtccataatgaggaagccctctggggtgatttatttatgctgtcaggtatagagctccgtcaggctaactcaccctgtggggccctatcaccccctcttatcacccaggctttttccctaaccaacctctgtgcctttgggggaaaggctttttgatttcccagtctcattcaaggcaatggctgaaaaatgtgcataggtttttctaggggcaggtggggaaaaggtagggacgtggattgtgtgacccagcccatctaatgcctgacatggtgcagatgggcaagacttggaggcaggctgtgggctgtgcagatagagatagcctcacttcgggagcaggattcctagaagctgtggacgtttattatgaaaaactgtcccacacaaattgtcccaaagggcagggaggctctgcattccacctcggcacctctttcaccatttgaggacccattactcttctgtagaaagcagactttgtttgggttggaagcacacctccaatgtaatttaatcagcattggactttggctcttgtaatcaaatatacatatactttctcctgcaagaagaaaaataatttctctgtaactggtattgacttgaagtcatgtaatctctggaaagcatcacatttttaaagggaaaggtaaaattaaggggaaaagaacccgcagtgttagtggtttgctttgtcatactaagaagagccagttaccacttaagaaagggcagaagaagcattcctagagcataaatacttgtgctgctccaattgtagatatttcatttacagttttctctgtgcaatcagccttggagatggttaaggataggaaactaggttgactggctcaccaaattctagaatgtgggctttattacttatgttgcattgacatccttgaaggaacctgtttgacggctcatttttctgccgtatttggagaggccacaggcagcagcagctccttgagttccagcaggatctgggtgggtagcaagcctttccttttaagggtgattggcagccattggcagcttgcttcccactccaccccagtgcccttgagcatgaagctgtgccctactgcgtcctcctggagcaagcttggagtccccaccccccagggtgaggttctgggctttgcccaagttgagtctgctagggaatctgttgtaaacacagatccattgatttgcatttgtcagagagtaaagttaaaccagtgaaaagagaagcccttatccttttatgcagggccagggaaacctttcatattgatcctattgatccaacctttccctttaaggaaaccacatagttaaagaccctcgttcaatagatttacccttcgtgcttgtgatattcctttaagtgttctcatctaggatagctgggcattaagcccacactccaaaccaaacaaaaatgggaaggggggtgggaagagagggggtcaggaggcagaattgtgggaagtgaaattaaatcaaactgaaatgtgtaatgacccagttggggatgtttttctcattcttctaaaatgacatgcagggataaagacaaaatagatgcatttggcatctttttttttatgagaaaagaaaatctgtttatatgcctagagtaaaaatgtctcaggaacatcattttctactgtaaaattatttcaattaagccaccagtttgcttcattaagattggttcacttaaaagcagtgatgttgccacaattattttggttcatttgtagcaaatcagaaaaaggattctccccagaaatgcaatattttggactctgtatatgagcataaacactgaagtcacttgaaaagagagaggatttggagtttttgtgttctgctggatgtgggaagcaacgggtagaacttttgttgtggagcagagtagacgcaataggaattgccagatattgctcagtatccctcttgcttgtagatatgaaaatgtaagtctcatttgcctccagaaccatcggcacaatccatttcatttcttccctgatccttttttcctgtctaaataacatccatttgtgatttttttcaacacggtacatgacctgtttctaattggctatctcttgggttgtttttgtacattcatgtttgttttatgtgattgaaaaatattaatgatttcgtaggtgagctaatgtatttatctgctgagcgagttcaaagggcagagttcagctatggttcaggttaattgaacaggaagcagtgagctctccaggctgtgttgaacaagggatcagtcccttaaaatatcacactcagcaaacacaatttcactgtcttcatcctagagtctgatgtaaaaggctcagatcaacttggatcacttgtttaaaaaaccaaagcaaagcacagtaactgcagcaataccctggagtccccctcggggaagaagagttttctcattggctaattgctttattggtagcactgacctgcagagcagctgcaggagcctggatgaaggcttaggcctcagaataatgtgctccattagaacagggcaaggcattttttgtttactcaattggagctccctgcaaagtgccattaaccccggcccaactgcttgtgtgctgcaaaagccaaaggtcacgccagtcagtctgtaggcatagcagctctgccctggtaggaaggttggggtcgcatcctgctggcactgccctcccaggggctcgggccagccctctgggccctttccagagttttgactaaagcaagcaattgcacaacttgtttacatttcccaactgctgaatcatgttttgatgattaaacagttttgatctgagcaccatcaatcacacacatacagaaaatccccccactgcccctctattttctatttatgttctcttcattactgtgcattacagtaaacagaattgtgcaaacggtgcttttagcaggaatatagttctgataagtgcttggatcaaggggaagacagacctccaaacatggctggggggctgtttggtggaagaaaggtttcaagtggagtcggggagcacagtcagggcttccaccgccagcaggtgaactagagtgccacctgccgggagtcttctaactgcactaagccctgcaccttccacaaggtccaagccccttccttcactttgttcctaatatccttgtccccattccccaccctgcagatcactacccatgcaagcattatcttcctagaagtagcttaaagggctttttcctggtcctttgaaactgtaacctctgcctcttctaattcattgccaaggagaaatcaacagttctgctgtcataggtgaggtgatttgcccatcctgcacattgaggtaatagtctcctgcttagttggactgtgcttgggggaagagaagcaaagaaagcaaaaaatagccgtgggagggaaaacgaatgattatgtgtggaagaaaaatggctccgttgattgtgccagtgagggctgtgccaactgtaaggtgttctgcaaagataaaatattgtacaaaggagagaggatgggagagaattagcatctacagggaggacatcgagaaagagatatgccaaatcagcaaactcgagtttaggctttgtgaaatcccctggaaagagaaaaagtgaaccagccgttttgcaattgcaaagaagtgagccagtgagctagacttcgagccagactgtggagctggctgtagctctgtgggtggcagctatttccacacttgcttcacatggacccctgcctggagcccctggtagcagagcgcctgtgggtgggttgctgcctccacgccccggcgcaggcttcagcaccacgaacagcgccatggaggaacgctgtttgagcgaattggagatggaccctctactgcggttaaatccaggcaagagcctgaccagtatctccagctctgtaggtctcagcgccccagtgcagggcctcatattttcctctggagccctgtggcttttcagctctctgtgtgagatcagcgataataaagggaagaggaggcggcatctgggtgagaagacaaaagatgctgaaagactttccctctgaagaggaagagcattaccaccgctggggggcgggggattgaactatttttctccatgttgctgccttctgcaggcatgattgccaccctcaacgggatgttttagatttaggatttcctttcaagtgttactgtctgcctgcccccacgccccaccccccaggtatacacaaacggatgcttttgtttccccagatgcatgctcctgatttttgaaagcatgacttttattatattaaacaatattctcacattatagcagcagtaatgtcacaaggagaaccaactgtggagcatcaccaccttcgataaatctagaaactggatttgatttcttgagagtctagtgatgaggctctttttaatgaaaaccttgccactgcttctgtccctgaccccctacgaagggccagagatgttgagtgacttcctccaggccacacagtggagtcatatggcactggccagggtgagaactgacagtaggcactgacccctgactctggcctttttcaatcagttgctttgctttatttctggttttattccagagaaaagagataggagagtccttttggtcaatgattgagcacaactcacatctctttgggtttcgagtaaaatggtccttgacttcccaaagctaattaaaatgtaaaactcttgctttatttcaaataactttagttcagacctaatttattgctaaggtggttctcagggaggtagagcattggaatagacaagtgtgtctcctttaaaagtcaagggtatgataaatgagaattttttttcccctgtgacaatttatcttcaagttccaggtggccctttgtgtaaaaggagggaaaatccatcccaaaacaaaacaaacctggtagagcattcaaatttgatgttgaaaaaaattgtttctgtgtgtctaaatgcccaaaattttgttctaaaaatgagcaggaacatatctgaatcagatataaaaatgggtgttaaatgtattttgtaagctttgactaaagaagtttcttccagctgtgtagtcttcgaatctgtggacgtgcctttctcaggagttgttgggttccactgtcaaaaccttttccagtaaaacatggatttggcaacagtaagtgtagcctttttggcctactttatatgcatcactgcatcttactaaaatgaggcattacactctacaaggacttgtactgaatgcatttcctttgtagtgaactcaatatgcttttgaaaagatattttacagaactgccacataaacaagaccttttctattatctgttttgaccctaaatactgaaaagtgtgtggagtaagataattttatgcttttctgaatcagtgccatagatccccaaacctaaaagatgtaggggaaaaattcgtcttggatgcaattgcctcctaatgtataccagagttcatttctgttcatgttcaagggacaagagtgaattctgtattcactttcaatgactaacccttctcatcctttccttcattcttctgaagaggaagaggtggacttcctgttgaagaccaaatcctctcctgccttctcaggaccccatgcttcctgtatatagatgtccctgcttttgtgaagttttctctgtcctcctaaattgggatctctttggaccatccctccctttgcatttagaacatagataggtatcgcctgctgacttgtcagtgtcagcccattagattaagatccagaagaggaggttagatacagcatacaggaggcagccaataaatatctgtgaataagttaataaatacttttcttttatatgacactgtttctacccattgtatttcccccatattattgtagatggcatctgagtaggaatcatcagccccagcacatcatttaggagaagcatttcacaatgtcaagttctcatcaatgtcattttcctcccaaattacgatattataactatgtattaattttaagggaatctcaaagtaggattgagtcttatccaaatcttcagattatcgccagtggagcaagagatgtgaaatgatcatcactagactctagactaaggacccattttgccaattggctctagttaccccaaagtaaccctccccagtcagtcagttctcctcgttttcctgctcaggcattgtcctcactgtcctgtccatgtctttgcacgttctgttccttctgcctggaattccttatctcatcagtccttctccaggtcctatcattcctagccacctccgatctgcctctgaaatcttcccagctaactttggcccattcctttctgtttctttctgaactcgatttgcaatcattgcaaatgacagaacagccttgttggctctggtcttacactgctctctaggtcttttctgtgtctccctttcttccccatggctctggaggggagatagcatatctttgagctccccatggactgctggtccatggctgaacccacaccaggtattcttttttgagtaagtcatttggtggcctcctgtctatctttacagaagcccctattctcaacgagagaataggttgggtatgtttacttacatctatcattcttttctagcttcttctctcaaaagggggtattcttttcttattttatttttttgatctggagccgtactttgtcacccaggctggagtgcagtggtgcgatctcggctaactgcaacatccgtctccagggttcaattgattatcctgcctctgcctcctgagtagctgggattacaggcacctgtcactatgcctggctaatttgtgtatttttagtagagatggggtttcaccatgctggccaggctggtctcaaactcctgaccttaagtgatccacctgccttggcttcctaaagtattgggattacaggcgtgagccactgcacccaacctgaaaaaggggtattgttttctataaatgctttggtcattgttggaaatattggctacataatttaaaatggatttctatgttaatctgaaatgagacataagcttaatatagagaaacagggcttgtgatgtcttcgttaatagcaaaggttgttctgcttcatacaagatggaaaattttacccacctcagggcaattgtgccagcaattatatcagcaaatcagagggactgctttcctattttaagtcattttaattatcagtaaactaaacttgcatctaaacagccattacttgagatactgcaagtgcttaggttgttaataacgtaaagttacctgtgaagaaaaaaaacagaggttaatatttttatctttttattttattttaattttatattttattattttcctttgatgaatccattgctgcctacactgtactgaactaagtagttgggagtgaaaatatatgaactagcccttgtccctttttgactttactgtatatttaagatttgaatggatacatcctcacttacctttacatatccatatggaattgagtgagaacagagtttattactatgtcaactttagttggaaactgaaactaagatcatttatttgctatacatcttacgtggaaattatatattagctcgtgatatttcatcttttttacagttatgttttgacgttcatattacatgagtaacaaattatgaagactaaccatttatgaacagaatttagtgttaaatgaaagcattccagatttttattttctgttgccttgaattgaatgcattgctgtgctgcatgataactaggtaagcaattgacctgtgtgactgtcatttctgtgccttgcataaccaaaccaagtttcctctgacactgaggcagagacaggcagggttgcgctgggcaggaagcagctctgaggcctccctgaagggccttagactcccaatgggggagtcagaggccaccctgttctctggctacggcaccatagcctagacatgggtgtcaccaaaggctatacacttctttacctccttttctgccctcttcctaaaggaagcatctggaaccagaaggagtccatatcgctagccccactcctccctaaccagttctccatcccgagccttagattcaggcttgcataggcagattctggaaagtccattaaaagggcaggatgtggagtaaataggtgattggattggagggtaaagggcggaaaattcacagcagagacaggtggacttttctaactggataagctacaccaactcatgaatccaagtattccacccctggaaagcaagaggtgaaagcaagttggttccattggtgaaagcaagtcacctgcctgagcccagagacagggtggaaaggctctacaaagttacatggcaggaagcatgggcacagaaaaggcaagcatgaggaatggggggggcggtgttggtgtttttctttgtttgtttgttttgttttgtttgcattctacctcatgccatgtattttagctcatttattcttggaagctgccactgctatggtgatacacagacatcaaggatgtccaatagtatagggctaattttggcaacacagaagataagtgtgggggtatttcacattcataagtaacaaacctatgcccacctggacaggaaccacgcctctttgtattgagactgtttgtgacatgcttgatcttctcgactagatcatagcaagcagggaccctgagctttgttctcctgcatcttccctttagccccaccacaatgcctaacacatagtttgcacttagtaaatatgcaaggataaatgatccccagaatcccactgctctagtgtcccaatgggagatcccctcaagacccaccaggtgattgcttgtagctcaacctgtattttattttattttattttattttattttagagacagagtctcactctgtaacacaggctggagtgcagtagtacaatcttggctcactgcaacctccacctactgggttcaagctactctcctgcctcagcctcccaagtaggtgggattacaggtgcccaccactatgcccagctaattttcatatttttagtagagatggggttttgccatgttggccaggctggtctcgaactcctgacctcaggtgatccactcaccttggcctcccaaagtgctgggattacaggcgtgcgccaccacgcctggcctcaacctgtattgtaaaatagggtttcactttaaacttttaaattttgttctactacaataattaccaaattccaggggagcaaaggtccaagcctgttgcctacagaattaaggcatccaattcagatctcaattattttgtgttaagaaaatctaaacaaagcaaacactgcttagggtttaccaatgaataaagaagcaagttggaagggatatcaaaaagatcaaaatgtttgcgcatttataactttaacaatgtctaagtttttttaaacttaggttctacatctggagcatacttttttaaaaatcataagcagtgttaaaaaatacttgacagttttgtcttgattcttaatgtgggtgttaagggatgccgtccattagtgagtacaccccagatcatgtgtttattgcatcctccttcttccctgcctgtcccctaatgatctggtgcacagagggctacttgagctgagttatatggatctcagttgctgtcatttgcacatacttaattcagagaggtgatcacattgatttccaagacccaatttttaagacactgtactcacgtagatatcttagctgctctgactatgttgtctgaaaaggaaaacattttaagcctttggaagcaattttgatggacatttcattgtgttctatattactcacataattaaatttccttcaagtcaaagtctgtttaaaattaaattgagaaatatttttgagttccatcaggcagataactttgtttagctagatttgttctgcattcacatgaaatggcgtcctacgaatcaatacccagtgctcacagttcccctgaatgtgaagaaatggcacccttagtagttcttgtgtttttatgcctatggttttgcaggctggtttattcagattctgagcattgtgaactaaattcataacttctttcatgcattagccggagtcataggactctgatttacagactcgcagtccagctcacagcggctagctttctttgggtcataccagagtttcatctgcatggccaaaggggtagaattccaacttgggtttgaaagcaaataggataaattgtcagaagatgtattcctgtgtacatctttggaaacaagacataggaacaaacccttatttttcaactccacccaccctgctactgaggacagaagaacaagccctcctcatcttttatcctgcctctccttgagacagccattccattaaattctatggcgagggaatctatggtgttcgagctgtaattgaagaattagcattccataaatgctgccttaatttttttaaaaaaattgttccaaagaactgctttttgttgcattgttaattagcctttgaacatttttgaattcattataaccttcaaggtctgccaaggtctttaaggtttcttctttatggctttgcctctaaataacaataggtacattgtaaggttattgtgagccttaagtaagttaatgcatacagatgcttagaataactggtaaatagtaaatacttgctaaaatatctgccattattgattgattgattaattttttgtaacttctccatatatcagcaggaaatttggcctgagtcaccaatgttcccatagcttttatatattaagaatattgcttggcattgtcaatgacagcatgagccaaacagatccagtttgtatctgagccaccatttactagctctgtgatgtcaggcaggggacgactcttgaagagcctcagttccctcctctgtaggaggaggacaaggtaggtcctgacgttatctagttggtgtacagattaaatgagacgccataagggtatatggcacctggtacattgcctcctatctcctcagttttacagctaacatcctattacacatgggccacatctgtacttcaacataaattttttgtcattttctcagatgagatttaggatgagtgagattgccagactctacactcatcactgggcatgctgtttgcaaactggccaaccatgcagccggactatttactccccacccccaatgtccttttaagactcccttaacagttatggacattttgctaagctcgtgcttagaacccagaagttgactgtgcacacagtaggttctgactgaatccctacaggcttagattggaatacagtccattttgcaagtgtggtatgtattgagcagacattctgtatttgatggaagttcacatataaaaatggcaactgagccaacaaaactcacatcatctgtctctataatgatcacaggtttggggggccttatcagaaagttatttttatagacaccccggtggtcatgagatttaaaatgctaaggagaatggcttcctctttaacctcttttctgtttttgatatgtctgggccctgcttctttatcttgttccccaaatccattcacttaggttctgacttggctccctggagagctcctgttttggttcacaccatcatctttattcccaaattaggatccttaacaagaaaagagaaaagaaagaaaacctgtagacatccagatgttgctttttctgaagtaacaactttatttgataatattttgaagccatgggccaccgaattctcaacatgcaagtttatttaaacagtctctagtatcctttcctgaccccaaattactttcaagcattaattgtcctagtggtttcatggccatattatttcatattcattagtgttttcatgaaaaattataacactaattagagtggcttccagttaattcacttggtgattcattactctctccttcttggtgatctgcatgtggtcatcctggagaaagcatccaagggtaattgcagctctattccctgagtgattgcctaatgccattagttctgatccacaggagcatctcgggaagctctgatggggtctggttacagctgcacccttgtcctgccctttggatgcagggagaaagggaagcctgcagtgaggactggtcctccggaggggtctagggaaacagaggggagggacgtcttagggaaaaggaagtaggggcaggggagggagttcagggatttgaacatcactttaacatcttctagaacttgggtaaggacagtatagagtaaaatctgccctgagaacttgcacgtagagtaaggaaggtggtttctcttcagtttcagcagacttgtggccaggcactgagctggagtttggaaacccggttccctctcagagctctgacatccagttcttccaactgaaagtttatttgacctcattcccattaggatggctgctgtaaagcaaaatgaaaacaaaaaataacaaatgttggcaaggatgtggaaaaattggaaccttgtgtgctgttggtgggactgtaagatggtgtagccactgtggaaatagtatggcagttcctcagaaatttaaaatgtgagttatcacatgacccagaaataccacttctgagtatacactccaaaagaactgaaagcagggtctgaaagagatatttgtacacccgtgttcactgcagtgttattcacaacagccaaaaggtggaagcaacccaacagttcatcaagaggtgaatggataaacaaaatatggagttttcatacagtggaatattatttagccttaaaaaggaaggaaaatctgacatatactatggtctgaatgagtcttgaggatattaagctaagctaagtgaaataagccaatcaccaaaagacaaatactatatgatttcacttatatgaagtgtctagaatagtcaaactcatagaaacggaaagtacaatggtgcttgccaggtgcctgagagagggaaatggaaacttgtttaatgagtatagagttttagttctgcaagatataaaagttctggagattgtacaagaatgtgaatatacttaacactatggagctataaccttaaaagtagttaagatggtaaattttgttgtgtatattttaccataatttcaaagaaagattgtttgttatttatattgtattgcttgctcaatttttaaaaaaaattaaaaatagaaaaacaaaaagccaggtgcggtggcatgtacctgcagtcccagctactggggaagctgaggtgggaggattgcttgagcctgagttctggactgtagtgccccaggcccatcaatgtcctcactaagttcaccatcaatacggtgacttcctgggagtggggtatcaccaggttggtgagggaaaaaacaactactgccatgttgctttcagttcttttggagtatatactcataagtggtatttctgggtcatgtgataattcacactttaaatttccgaggaactgccatactatttccatagtggctacatcatcttacagtcccaccaacagcacacaaggttccaatttttccacatccttgccaacatttgttattttttgttttcattttgttttgacagcagccatcctaatgggaatgaggtcaaataaactttcaactggaagaactggatgtcagagctctgagggggaaccaggtttccaaactccagctcagtgcctggccacaagtctgctgaaactgaagagaaaccaccttccctactctatgtgcaagttctcaaggcagattttactctatcctgcccttaccccaggttctagaagatgttaaagtgatgttcaaattcctgaactccctcccctgcccctacttccttttctctaagacgtccctcccctctgcttccctagacccctccggaggaccagtgctcactgcaggcttccctttctctctgcatccaaaggtcagttgtgtttgctcagtagtgggatactgcctgtgaatagccactgtactccagcagcttaaaactccatttcttaaaaacattttttatcaaaagttctgccactccactattcacaatagcaaagacttggaaccaacccaaatgtccatcagtgatagactggattaagaaaatgtgacacatatacaccatggaatactatgcagccataaaaaaggatgagttcatgtcctttgcagtgacatggatgaagctgaaaaccatcattctcagccaactatcgcaaggacagaaaagcaaacgctgcatgctctcactcgtaggtgggagttgaacaatgagaatacatggacacagggcggggaacatcacacactggggcctgttgtggggtagggggctgggggagggatagcattagaagaaatacctaatgtaaaagacgagttgatgggtgcagcaaaccaacatggcacatgtatacgtatgcaacaaacctgcacgttgtgcacatgtaccctagaatttaaagtataataataaaaaaaagttctgccactcaaagagaaccacattaatattttgcttttattaaaattatttttaattatttaagcaatgcattaaaacattctacttataaaaatcaaaacattaatgatcagaataaagtcctctttgcctatctcctttaataccagtcttcttcattacttcccagcagtaaccactcttctggctacaaagagtgggtctgccaatccaggcacttccagtgcatttatttacctacatatgtactcatataaattgtataaataggtagaaagacagatagatagatcgataggtatcttaggtttgcgtattgttttcacataagtggcatcacactgcatgcatcattccaaagctccttctttcctttgatagtatgcctacccagcttctacatataaatgaggttcttgcaacccacatttattgcatagtgtcctatggcatgactattttcatttatttagccatttctgttttgatgggcaattaggctgtttaccatttttggttgtttgcattatttgctaagcagtgatgagtgaacatccttgtacacacctccctgtgtacccatgggaatgtttcctagggtggacaccgagaagcaaaatgagaggtcatggagatgcacatactgtaattttgataggcactaccacactgtcttcgaaattggctccccatcagcagtggaggagagagctcctatttccctgacacttgccagaagttaatatattagccattttacttttttttgcatagttgctggatttaaaaataacattttgtggttgctttattttgttatatttttatgatttctaatgaaccttgatataatcatatacttgctggtcatatatatttccttttctgagaatgtcctgttcatatccttgtttggcattgttttttatatattctggatgcaaatttttgctttacaaattacaaatgtggtctcagttctccagttaaaaggcataaagtgattgaatggttaaagaaacaagacccatctatatgttgccttcaggaaacccacttcacccataaagacacacatcgactgaaagtgaaagagtagaaaaaatatttcatgcaattggaaaccaaagaagagtgggagtaactatacttatatcagataaaatagactacaaatcaaagactgtgaacaaagatgaggagggtcactacgtaatgagaaaagggtcaatacagcaaggggatataacaattataaatatctatgtgcccaacactagagctcccaggtatataaagcaaacattaatagatctaaagggagggatagactataatatattgaaaacattttatcccatggtattattttgaaacttaataaggcttcttttaactttgatgtatcaaattcatcttttttattatttattttttatgagacagagtttcactcttgtcgcccaggctgagtccaatggtggtgcaatcttggctcactgcaacctctgcctctgggttcaagcaattctcctgcctcagcctcctgagtagctgggattacaggtgctctccaccatgcctgcctaatttttgtatttttagtagagatggagtttctccatgttggtcaggctggtctcgaacttctgacctcagatgatccacccgcctcagcctcccaaagtgctgggattataggcgtgagccaccatgcccggcccaaataaatatttttgttgctcttcctttactttatgtgttttgcttcttgggtcatttttatttattttatttattttttagaggcaggatctcactctgttgcctaggctgagatgcagagccccaatcatagctcactgcaacctcgaactcttgggctcaagcgatcctcctacaaaagcttcccaagcagctaggactacaggtgcctgccacctcatccagctaattttattttatttttttcatacagatggagtcttgctatgttacccaggctagtctcaaactcctgagctcaagcaatccccccacctcagcctgtgtgctggggttataggcgtgagccaccatgcctggccttgggtcatttttaaacatttgaatctttattctttaatttttctgaagttgctttttataaattatgtgaaattggaatctatttttttaaaatctcaaatggatagccaactaatccaacagtttctgaacaattcatctcttctcactatttgaaatgcaatactttctttataatatattatattcccttatgtacttgggtcagtttctgcactccattctgttccatggatctattaaattctgtgtcaacgtcatactatttaaattatttttgctttatgatatatcttgagctctaataggatatatattttctctcctcatcttctgtttctacatcttcttagccttccttgtattttcacttttccataggaattatagaatcagcttgaatttatatattattttgatcttctcaattatacatagggcacagagttctattcattcaaatcttttttttttttttttttttgagatggggtctcactctgttgctcaggcctgagtgcagtggcacaatcacagctcactgcagccttgacctccctagctcgggtgatcctcctacctcagcctcctgaataactgggactacaggcacacccaccacacctggctaatttttttgtattttttgtagagacagggtgtcactctcttgcccaggctggtctcaaatgcctgagttcaagtgatcctcccacctcagcctccctggcattatggcgtgagccaccacgcctggaccccaaatctttatttatgtcctcagcaagtaaaaataagttttagttttggccttttgatcttttggttagagttatttctagctacttgttactgttgtgaaggtttttttctgttgcgttttggtttcatagttctttatactcaagtatcctaaccactatagtttagtgttgctgttttttttttaacttcatataaacagactcactatatgtgtattcctttgtgtctgatttcttttttccaacattatcttcatgctgttatgtgttgctgcatgtagtagcagtcattccttctttttcataactctataatattccactaaactcatatgccacagttaatcaattctcctgtcaatgagcatttggattgtttccagttttactacagagctgctctgaacattcttgtacatgtacatgcatcctaatgtacttaaccatacatttctgtggggttttcttaatttgagtttcttcagaagcaaaccctaaaacaagaattcaagtatgggtagtttatttgaaaggtgattccagaaaacactagtaaaagagtggagaagcaagacaggaaagggaagaagcccaataagagtcacttcatgaagcacattagtagagtgggcaaatggagcttaatcctgctgagtaactctgtgaaactccagagaaaatatgccttagagttgttccagctgaagaacaagggtgctggggtatttatctggcagctccaattattccctaattgaggaaatctcctggacccttccccagcccttctggcctgcactgcatgtgggcagggcaggctctggcagccagacaaagccctcaggcaaagagctgaaggtactggcagttagaagttgggctgtcgtgccccgcagtggtgaaggccaggagagtgtggcagcacatgacagagtctgctacaagagagtctttccatgagcagaatttctgggtcatagggcacatatatattcaaccattgcagatactgccaaacagtcttccaatctgttgtcccagtttgccctcccaccagcagcctaggagaactcccgcaaggctgtgtccttgccagctcttggtattgacttttacatttaagccattttgataggtgtttaatgttgtctaatttgcaattcctggattactgataattttgagcatcttttcatgtaatttttgaaaatttggatttcttctgtgaagtgcctgttcaagtctcttgcctgtttttctattggaatgtttggcatttccttattgatttccagaagattttatatattctggattcaggccctgtggcagacatatgtgtttaagatatctgtggctctcctttttactgtcattcctgtcttttgaaaaacagaagttcttaaatttttttaagagacagggtctcgctctgttacccaggctggagtatagtggtacgatcatagctcactgcagctttcacctcctgggctcaggcagtcctcctgcctcaaccttccaagtagctgggactactataggcatgcaccaccacgctggctaacttcttaaaattgttttttgtagagacagggtctcactttgttgcacaggagaagttcttaattttaacgggccccaatatataactatttctctttgggctagtactttttgagtactaagaaatctttcctgtgattatgaagaattaccctatgttattttctttctttttttttttttttttttttttttgagacagagttttgctcttgttgcccaggctggagtgcaatggcccaatctcggctcactggaacctctgcctcccaggttcaagcgattctcctgcctcagccttccgagtagctgggacaacaggcatctgccaccacgcctggctaatttttgtatttttagtagacacggagttttaccatgttggccaggctggtctcgaactcctgacctcaagtgatctgcccgcctcggcctcccaaagtactgggattacaggcataagccactgtgctcggcctaccctatgttattttctaaaaactttattgttttgccatccatactaaggtctgtaatccatgcagaacttattttttgtgtatgacatgaggtaggggtcaagaattacattgtgacacaatgcctatccagttattccaactccattacaggagagaacacatgttcctcatgttctgcatatccaaccttgtcattgaatccagtgtccatatgtgtatggatctatttctgggtttctgtccttttccactggtctggagttgtatgtccttgctgcagtattacaccatctattgtagcctcattaaagatcttggtagttgaaacagaaagttgtcctacgttgttcttcttcatctagaatagcttaactgttcttcgatttttttgcattcccagttaaatttcagagtcagcttgtcaaactcaaactttctttcctttcctcttgaaaggaaggaaagaaggaaggaagagagggagagaaatctgctgggattctgattagagattgcattgtacctgtagatcaatatggaaagaattaaaactcttcacaatattgagttttccaatcaatttatttaggtattctttaatttctctaacaaagttttgtagttttccctgtcaatgtcttgtatacctattgctagatctattctatgtacactcttgatgttttgatcctattgtaaatgatatcattttcatttactgtttgatgtgttatggagaaatacaattgattttgtctactgacttgagtcttagaatcttactaaattctcatactaattctaacagttcattgtgtattctcgtggatttttaagtacacacaatcaatattgattttctatgttcatcttgaaactggccaccttactgaacttttttattagttctagtaatttgcctttcaaaatcttgagttttctaggttacaaaaccaaaaaaaaaaaaaagtccctcatattaacttataattatgaggattctgtttctggctgaagacgctgttaagtaaaagaagtatggagtcacactacctgaatttgactcccagcctgttatttactatgtaactttaagtaatttgcttaatcctctgtaccttggtatcattaattataagctgcctcatagggtggttgtaataattaaatgagtttatacacgtagaattctgcctgtcaaataatgagcactcaacttatgtaagcttttgccatttcatcagtttcctaaattcctttataaattttctttctaaattttcacttcttatttattttttcttattttattgtattggctccttttccgatataacattgaatcatagtggtgcttacacccctcatctgaaatttcaacactttgaaacatttctttctagtattttttttgttttttgtttttttgtttttgtttttgtttttttatataggcatgttgttttgttttgcttttcatgtttgacgtatctgaaattgtctttgactggacttccaaatctggtggtaaactatgcaagacagagatacttttccaaaggaatgtcttttgttcaaactatattattcacataaagatgaaaagtaataacgaaacaatttgtttttaaacattgagatttggttgtgaatggagacaccgaccctttttccttcctgcagattcattagtgtagtcttaacaaagaggtgctcttcattcatgtaataaaactttttaggatgtttggaaggagctcagggatattcgtagccacatagggctgttggccaattcttttttaagacaatatcacattcttgagcttttaagtttgattaaattcttagtaagctagagtatgtcttcaagttattttcatagaaaatattttcatagaaaattttcatagaagttattttcatagaaagcctatagttagaatttttgagtcattaaataactaagaatgcctttctacgggaaagaccacctgaaccacataaaattctagcattaccgccacagtgtcagttttgctcttaatttcctccaatgccactactgtatttctcattttcctgcaaattttaaaaatcttactcctctttttttgcggggggcgggggttgtttgtttgttttgagacagggtttcattctgtcacccaggctggagtgcagtggcatgattgtggctcaccacagtctcaaccctctgggctcaattgttctccctgcttcagtctcctgagtagctgggaccacaggtgcacaccacccacgcctggctaatttttgtagtttttgtagagacagggtttcgccatgttgcccaggctggtcgcaaattcctgggcttaagcaatccgcccgccttggcctcccaaagtgctgggattacaggcatgagccacctcatccagcccatcttttgtcttactactttttcattacatatggttacttacaaattgctattttcttcttaataattttctgttcctgtttcataaaagccacctctttttgcatcatattgttatatcaaatgattctctaaaatgttctttaagtttctggaagatattatctggtaaattttctctggttttcagatgaggatccctttttgtcttctactattttttcaattgtctctttttcctgtttattcattctcaaatgagaagagacccattctggcttgccatggtcaatagaaagggtgtatgttttgctcatgacctcttttctggatgttagtgcactcattctctaagccctatactaaatcgccagttgatacacctaaccaagcttccatctaatcagcttccttgttgtgtggccctgctgaactgatgtgcactcatctcctgcatccgatcctgggatgctgagaagctgatcaaatggaatacacacgacaacccccggtatactgcacatcgagggctcctcttgtacctgtgctcaccctgagtgctctggaaactacttctccaagggagtgatgtaccagccttggtgtccctcctccaccctgcagttttgttttgttttgttttgtttttttgcctagttgttttctgagagttgcagttcttaattggcaggtggaagggagtggggagtactctggctctttcaaaaggcagcacctaccaagtagatggatggctgctgaatttaaatttctcaacagttggaggactcagatgttattttttcaatcctgatgtcccatttcaacccagttccattggccttggccttgtgtttaggtaaaaaatctccagatcccccaaaacagactgactgcagtcctggtttttggtgtgctaagttttgtgtttcattacaggacttcgagatgattttagcagaaagttgaagaagctgccccatgctctcctagccattttaagccagatgtttgtatctggaattaaatatttgttttagcaactcacgacttcctggatggcttacaggaatgcagcttggcagcagagctaaagatccctctttgccaggcttctgcataggcagaagagatgactgggaattgtgatttcaaaggctgagtgccccaaactatttattctaataggaaggtgggaaataaaagccccactggactagacaggagggaatatgggttctcagggctgtgtcactgcataggtgaccctagctgggagttctgatctcttatttctaaaaacaaggttagaccaagtgctctctaaaatcctgcctttctaggagtctgtggttttagcagctgacctagaccatctgctattagaagcctgttctttgaggctactcatgtttgttagagcctctgctggagagaagcagaagtaagaggtacatctccactcggtgtacaggctccagtgtgcttcctacaggcagcacctgcgggcagctacaggggcctgaaccttcccctgggagatctgcccaccaggggcactctgggcctttttcaggccatgcctccatataagaaagtcgtgagacatccaagagccctcatttcctgagtccccttcagtgactttgtattgaaagtaaaaatagagacaggaaataaaacttgtttttttcagagaatgtctttgaagcttgggaacacagaatggtcgctgtgcggtctgcctccagccgacagtaagtggacactggggagttgctctagcgcttgtcaagaccagcttcgacatccaagtgaaagcagaggcggcggtgtggagaaagagcagagatttgccattgatcatccacatttcctttggttttttttttgtttgtttgtttgtttgttttttttcctaagacagagccttgctctgtcacccaggcgggagcgcaatggcgtgatcttggctcactgcaatctctgcctcccgggttgaagtgattctcctgcctcggcctcccgagtatctgggattacaggcacacgccaccacacttggctaattttttttatttttagtagagacagggtttcaccatgttatccaggatagcctcgatctcctgacctcgtgatccacccgcctcagcctcccgaagtgctgggattacaggcatgagccacctcacctggcctatcatccacattttctagatgagaggaagaatgtactacaggaaatctccccaggatctgagatttgtcctgtgtcagaggtgaagcccaagacacggctcacaccgacattccagggcagtgccaagccttcccggactccgggcagctcggaacttggggactttgcccccaccctccagcatctccagaatgaggggagtgtgtatgtgtgcatcgtgcatggcccctcctgccttcttgttccttctccctcctgtctcctttttcctcttgctccgccattctcccgcccacaatatctgctctaataagccaggcggcagtgctccaactagcccataggtggttcacgctggagtaccttgtgcaggataatttgccaaatgggttagaggtctgtcttgcaaggcctgtgcatacatccacaattagaagggagtgaaaggaggaggggaacctaacaaccaagaatggctccacatccatttgcacagtgtccaccctgtctctgcccttggcctcccaaatggatgttggtctggacgtcactggctccgctgcctgtctgtattggcatctggtacatgaagaccaagtttctgaggaaagccagctctcaaccttgaaacaaagccattaagtttctcatctgactcagatcaggcacgtttggagaaatgagggccaagttagagtttagttctagaggtggttgggggcggagggcaggttcatggtactggctccatggtcatctgaacctaagtggcctttggtgatgcgtcagaaatcacaatgaagcaaggaaacctgcaaggcatctaactgggaactatttatagtttccaaaatttagggagcacaaaataatccaataatgattttaagacagaccctccccatccatcaaggcctggctcctcccaggtgggtgatcagtgcttctggcaccagctggccctgaatggccagtggagctgcttagagcctgagccccaagtcttgtgtgttaggccccctgctcccagggtctctgtggcaatgtgctggcacctaattatttgctgaccctgagaagcatgcattgctgagatttaccagcatttatggcttactgaatatcaaatatttattagcagagtgtacagttattctattttctttcttccttgtttgaattcaaggaatcttattatttttactttaaaggctcttgatcatgcagattagttccaaaggaagggttctctactggacaccatcacctctcccatagtcttgtcattctatcagtactgaagggccaccagttcagagcagggaagtgaaggggggttatttccattcttcttacctcaaacacctgtaggtttctcagggaacaagcccagaggtacaaatgtgaacctacttttgtaattgatttttccaacataaccccaattgactgccttagttaatctttccaacagaactgcaggccctatgtcctcccgggagagtgccctccttagtggaaagggtcacgctccccactttgcacaagccttcctaggagggaagctgcgagctcttcagctgaaaagcgaaaaggcctcttctgcaggtgtacttttcaaacctgtatccttggaggttaagtgtctgctgacaaatgcacaccctggatggtctctctccccactccccacccttgccctgacaagatcacattgaactattcagggaaagtatttactgaatgcaaggagaatagagcacttctgcattatttattaggggctaacaatacccatcatatgtagatgatattgatacccatcaatgtatttggacataaattagtatgttaggaaactccagtggtccaaaaccttttaggatctctgacacgtatgtaaaaacacgtcgtagtcttacctcttatatgaggctgggaattggctatgagacaacctcacaaagaaaacaaacatctttaaccttttatttgccattagccctctgggcagttcatctactatcgagtaagacttgaaatcatgaactcttaacctctccttacacaccttctttctgctttctctaaggaaggaagaatgttcacatttcctgagtgtctactctgtgccaagtgttacagcaagccttttgatgtcctggagtgctggacattagcatccccactctataggatcaggaaactaaggctcacagtcctgcagctgataagtggctgacaaggagtaggaaacagggtcttggcttccatctgagcttcttacagtacatttgactcacccctgggcaggaaggcaaaggtcattcttggcttctgtatcagttacctgtcaccacaataatgctgcaaaacacagaaccacagcatgggtgatataaaacaataaacatctatttttgcccagaagcttgtttgttggctgggtgtgtctgctgatacaggccgtgcttggctgatctcagctggactcaagtgtgcatctttagtcagctgctggatcagctggggctgtcccgtccaagatggccttggccaggacagcccatccaagttgagtggggagttccagttctggggcagcgaggactggaagattctgacccggtgttgagttgctcttacttcacaggcttcccagaaactgtggaggctgggaaggggttttccaagatcaaatccaggatccagtgctaattgagtcaccctaaacaaacgtgtttccttctccaagagtaaaatgggaatccatacctctgccccatcttcctttcagagatgttgtgaaaagaaattcccaatgggggatccagactttggcttccactgggactcacctcactgtgccttcagttccttatgtgaaactgacaaccctggactggacaaaacactgaggttctatggctctgtgaggaggaccaagctaagggagataaaagatgttcaggtgccttgaagagctaacaccactgcacctgcggaactgggtgtcaaggtgacatgcggttccagggtaattccccaacctgtatctgcctccctgaaccaaccagatactgtcccccttaccttaccctccacaccacacacacacaaccacacacacacacacacaaccgaggtcagtctaccctctgttcgggaatgggccctcccccatctctctccttgcttcccctccccaccagcacaaaggccctggcttccaacaccccattactgctcagcatccaaatatccaaagacttttgttactagaaggaaaacgcacgatgcgtgacaagcagcctttctggccggggaagctactctgttactgaccacgcagtcggtggcaaggtccctccccaagctgagagagaagggagagcacaggacaccacggggccttttctgtcctccatgatgttctccagtctcacacaatccctcaccctgtcccgcctccctttgcatcccctctggatgggaatcatccctggcttgatgagcgttgctgcacgactctgaccacatacctttgtgctgcccatgggtaggcgatggacagggccagggccggttagtctgggtgtcagagggcagctgagctcctagaacgcccaggagcagccactctggaggcaaagtagacctggcccacatggagttgggttgggatggggaaggcatggagaaagggtcagttgtggagagacattctctctctccaggttagaggtggggaagatcagctatggggagcagcacattcttggaaaggcactttgtttgtcctgtgtctgacctcctgaggggcaaaaatccagtggccaccagggagaagcaagttggtgtctgaagatctcagagagggcttgtgcccgaggccagggcttcccttgttttaccctgggaacccagtgttttgaaaaatttatctaccaaggaacctatatttttaggcagtagctgtctgccatccttgttaatcacagattatacacagatgtgtacatgcctgccagtaccaggtcctgggccacaggacacaaccagcatgaccaatctgagtcaatattatttctttcaaaaagtggggaaaggtagccttattgtaggtaaacaaatgacttctcttcgagtctttgaaatggaagcgagcgcttggccttccatgtggtcctacataggacctgcttccctgtgagagggagggagctcaagaatgtctgagggcttttgggatctacacccacctccccatcaggcagtgacacatcagctcctggcatgccctccctgctttcctcctaaaagagagaggagaagaatcagatccaaatggtctagacagggctgggctaaccttgcaccttccgtggcagaactggctttgagcagttggagttcaggagaccctgaccagcatgtgactgtgtcaagactgaatccatcaatgccactggaacacctgctgtttcgttgggtttctatcgcatccttgggttggagggagctattgacactttcctggctgttcaaaaatgggcacatgtggactatagagtgtagtaattgaacagcaccaaagccgtttgcactctgcttgtgcctgcaggcacacctggctccacagcccgggtctgaggatgctgaggtcacagcctcacaccagctcccagacgtcattggatctgtctcctttttcttaggctttcaaggcaggtgttctccctcctgtttttattttcctttagctcctgaccaactgcttttgtcaaaatcaacagctggcaattgctagctataaaaaccctgggcaacatatggacatactgcctcattatttagggcatttgggcttgctgtacacttctagactgcaagctacagctttgcatttgttgctgtggcatctggtggcttccaaaggctgttgggaaggcataggcaggatgtattgatctgttctctctgtgcagtttgcttcacgttaagtctttaatatttttatcttaaatatgtgtgtgtatatatatatataattttaaatatatgtatctcacacaaaatataatccgacaagccaatgtggacctgtacccaaactgtctaatcaccctattaaaagcacaaatacagcattatctgaagaataatcaatattggtatgaaaattgagagctatgtggttaatccaaaggagcgtgaattgacagaggacctcagccaatgtttgcagaagatatttgcctggattttgttatcaggagattatcatgcatcactatttattcagaatcctccagatgaaggcttgacaccagttgtcccaggggtagggtcagggacggttgtccagggacctgaagtggcagtaggggcaagcatagtggtttctacatcttaaaaggggctgcagaggtttatagaagcacagattccagaaccttgccccacatggtgaaaatcagaatttctgggggtggagacccagaggctgccctgcaaagagggcccctctgatgtgcagttgggtatgggtgccattccctacaagagaagtgtttattctttctttccctgggtctgcagcaaacctgggatgcggtgtcagtgtcatcacatatactccaaggtctccatgtatttccttttaaaatgaaaatcatttttcctgatttgcctagctcagagttactggggtaatacaatgagaaggagagtatgaagtgaagaggtacctgttatctcacttaagcctctctagaattgaacatttttatttccttatttagatgaggaagacaggcacaaagaggctacgtaatttgcaaggccccaggtcttggaggtgtggaagcccaggtttgaatccagagctttccattgcataacatgctcctctgagactgtagaaatcaggcagacccttgcaactcaaaccgaggcatgtggaccagcagcatcagcatcacctgggtgctcatgagaaatgcagaatcccaggccctgtccaggctgaactgcatgagaatctgcgttttgatgagccctccaggtgattcctatgcaccttaaagtttagcagcactgctgtagaggacttcagattgagcaagagagagtagacctcaaaacaaggttcccctgcaaaggctatttctgtgtgttaccaccacacaggaatcatcagaatccaacaaaaatatgcagtcttcacaggaatgagcaaagaagaaatcattaccggtaagctgttggaaggatggcagtgagcagtcttagccctttctgtctgagttcccactgcaggggaagcgctcctcatccaagaaagccaaaaggccccaaaagaatgagttttaagatgaaaacaaattgtttttatgtggatgtgttgtgtgtgtttaattttgaagacaatatgaatacttttagaaatgagagaaggaaaaatcaggaagaaagtttagccaagctgatacagcctagcagctttcccattcaggggctctcctcttcctgccctttgagagtatcagtgcattttgattatttcaggaatgattcatttatattactttatagcacacagcatccagcagggagggcagccagttaggtagaaggaaattcagcttccaagtatctttcccgtaagtgtttgtcttcaggttaaatcctgtcttagtctgttaaggctccagtaacaaccacaacaacaaaataccgtgacttagtgcttataaacaatagaagtttatttctgacagttctggaggctgggaagtctaagattaaggtgccagcggattcagcgtcaggcgatagtctgtgtcctggttcacagagaagactttctcactgtgtcctcccgtggtagaaggggcaagaggtctctctcaggcttattttataagggcactaaccctattcctgagggctccaactttatggcccaatcacctcccaaaggccccacctcttagtaccatcaccttggatgttaggattgtaacatatgaatttttggggggacataaacattcagacaccgtagcagaccgtccacataagatgctgcctgcagaacacattgaacaggaaatgcagtgcccgaaggccaggaaacaaaatatacaagccagtgctttgagaaacataggaaagcatctgagcagcaccctgggtgccagtcttgggggaatgtcagtccactgcaaagggattctcaacctctggccagaatatccagtaggatggattctgagggcgactgccccatctgggcctctgctccttcctggcctttccccagtttttcctgttgaggccacactgtcaccacacccctaggggagctgggacttatttcaagtgattttttttttttttttttgagatggactctcaccctgtcacccaggctggagtgcaatggcatgatctcgactcactgcaacttccacctcctgggttcaagcgattctcctgcctcagcatcccgagtagctgggattacaggtgcccaccaccatgcccagctatttttttgtatctttagtaaagacagggtttcaccatgttggccaggctggtctcaaactcctgacctcatgatacacctgccttggcctcccaaagtgctgggattacaggtgtgagccactgcacctggccatttcaagtgattataacacacgttctcatgttttagcattatgatttgtaatactgtatttaacctttacaggtcacttttctgagacaccgaacctgtctgtgaagtgtacagattccctgaaagcgtcaagaagccatttgtcctcattgtcccaaacattcattgtatccatggctccaaaaagaatcagtcaggaatactacagaggcctggttgctgccttctaggaacttgtaggctaagggagaggtcgtgacacataatggccttgactgcatatgtcagcccaggcatggatactcacttctgctaaatcaaagagactctgcatatactaacatgtctacaagcctgaagtcctattgtaacattgggcttcttcccccaccctcatcccctgtcttgtactagcttccaatttcaaactagccaaatgagaattggctaaaccaatttttctagtctttctctcccttggtcttctgtttgttttgttctaatttttcaaaagtctggacgaaaggaatttgggttgggatgataccatcattctgtcacttctaaattcattctgttaacaatttttagagtcacatgggtagaagctttgattctgaaaaactatgcacttttaagttttgactccagaaggtaatttcaactcagctgtaaacaattcgagagggtgaatatgaaagaggaactgcctcaccaggcttcccccaccctggcgtctggagtcctccctgccttcgtggcacctgatttcagagataaagaatttcaaggatatgctagagcagggaggatgtaaaagggaaagacaactgcagttagctcaaaaccagactgtgtgaaacagccctgctgctttgtcctttctcccatcccccactcactcactgatgccttccatcacccggagattacagggaaggctggttattgacagctgggcagtttgcacaataaagtttaacggtttacatctctttgtacaactttgtcaatgttttccatggatcaccttctcaggtgagcccactgactcctctccttcttctctttcccttcaagcgtgcaaacgcaaagagcaagaaccaaacaaagacaggaacaattcccagaagaagtcccgcctggtgttcactgacctccaacgccgaacactcttcgccatcttcaaggagaacaaacgcccgtcaaaggagatgcagatcaccatttcccagcagctgggcctggagctcacaaccgtcagcaacttcttcatgaacgcccggcgccgcagcctggagaagtggcaagacgatctgagcacagggggctcctcgtccacctccagcacgtgtaccaaagcatgatggaaggactctcacttgggcacaagtcacctccaaatgaggacaacagataccaaaagaaaacaaaggaaaaagacaccggattcctagctggggcccttcactggtgatttgaaagcacaattctcttgcaaagaaacttatattctagctgtaatcataggccaggtgttcttcttttgtttttaatggctatggagtccaagtgcaagctgaaaaattaatctcttagaaccagacactgttctctgagcatgctaagcatcccagaaacccaaatggggccttcctggagcgagttaattccagtatggtgtcaaccaagctcgggattgcttaaaatatcatccatcccacttcaggtcctgtcagcttcttgcagtcagagttcctatgagtaacaataggagtttggcctatgtaaggactctgagtttaggcttccaagatacaacaataagagaagaatctagcaacgagaatgacctcatttgctttccacatgcttagcctcattataccatgttatgtccaagttcacagccacaacatcagaatggtaattactgagcacaagttttaaatatggacgttaaaaaaaaaaatccaaggacctgtttttccaacccagacatcttttcattgaatgatttagaaagctttaagttgatccagcttacaattttttttttctttacctcctggaaatctcatatggtcttggatccgtcaaaaaaaccagtcagttcacttgcgctcaaagtatcaagcacaacaaagataaacagaagtgaggaaggttctgggttcactacatctggattttcaagacacctattgtgaagtcattagggaattgatgagaatatggcttcaagcacattttgcagtttgctacaaattctgttgtacataatgcagacgcacactcaggaggccaatttaactgttaacagtgcatggagcgaatgcagcattttaaaagatctaggtttttttaggtcattaatgtgtccttggttgatcagtcatctggtccctcctactgtgtgttatgaccaccacgtaatccattctcgctctttctgatttggggtttttcctcatccatcccattagtagggatgttttctgtgttttctagcaagaaaaaaaaatcaatcaatcaaacctgcatacatgttactcatgactgtcatctagtcctaaatctcttctgttgttgaatcatccttgcaaaacagctgaatacatctggagaaaacacagcacaccaaagaagcagaatactgcaaaccaaagacatttatgacttgtcattttctagcctaaaaatactgtgattacttttagaaatcagaaaacctctgcaactccgaatggcattcagctcttgcatttggcgcatcatcgggctgagcggaccagctacaccaaggacattagccaagccacccagaggggtggctttgccacaccagttgtcaccttcccatagcaagtggaagagcgcccacagaactctgggagattgcaaaggtcacaatgtgcatatttaccagtgaatggccccgggtggggccacgtgggggtgttcaaagcaagccaaacgctgcaatcattctttacagacacttgagactgacttttttatgaattacttagtcgaaaccaaagaaactttttctgcacctacttctgcaacaaacaaaactgtcccattaaaatgaataaataaatccgtaaatcaatggaaatcaccaccaataagaaggaagcacgccagaaaataaacgaaaacaaaaacagggagacacactgtgttcaaacagacctcttgggacattttttggaagcagattttaaagaaagggttgagacaaagatagaaataaggaagagcctcagtggctgctgcttcatttgacaactcacacggtaatcttaaagctgaagattgtctttaatttgtgcctatgcagtttttcaaaagaacacggaacagagcaacagaaacctcaacagctacaataccaaagatgaggatttctcacaccttttgtttcagttcattatctcctcttgcctggctaaaatactaatagcgccattgaactgtataaaggtaatcaattatgtttctctgagcaacaaaaggaaagggccatttatttgattttattgtttcatttcaattttgtcttatggttttttgccccaacatggaatctctcaaaagtttccatggactccaagtttaagatgttgggatattgaacagttctctctgctcagcagagggtagggaataacattatcacttgaatgttctttgcttaacccttagacttggttccttctatgttcagagtctcatcatcaggggaaggaaagggagtgagggtcagggataggggtcttggtgatgcatcctctcccgagccacagaaccaaagagtttatagaggaatttacagcctcgttttcatgtgattgctacatcctaacagggcttcatttgggggtggggggaaacatgtaaaaataattgccagtttctacttttctattagctttttaaaaatcagctgtaaagttgcatttctaaagaaagatatatataatatataaaatacatatatagatcaacttgacattggtgataaccaaaattattgctgtccaaattcatgtcttgttttggtccagtgcttcatttgctaagtattcggttcagaatttttctcatttctcatgccattccagagttaatttgccactgtggatgatttgaagtattcagatctctatggaagtttctgggacaggtttaaagtcaagatcaagcattttagcatttaacctgttgataaatggatccatggtgtacatgagttttatttgtattcggagtcatctctattctatccctcagcctcgattaaggtggtgagtgaagtgcatccaacagactcggcccagaactgggtcctgacagtggggtgctcatcttctgtaactgttgggaaggctcggtggtccattttcaccagttaaagaatatgaggccagcccagaaatctgttctccaggagctgccctgtcccatctgggtgtgccagaccccctcagtgagcaggtccaccaaagggacttctcacaggggaagcccaactcctgttgcaatgggttgatagatttcctcagggtggtaattaccaattcgtattttgacaagcctatgtgcaaccacagctggcactggggtgggcagtggtgttgggtgggatgggggagagtgtctcaatcctgaagagaaaatataaagcaggttttggggagacttctggagtcctgcccctagagagccccattgttgttctttgtgccccctcctcattccccctatgtgggtctccctatgcaggagctgtgagagaatgtgactctccacaatttttataattcatccttcctaggagattgttcattggctcttcccttgtgtccctttgtcccttgctcatactccatgtttcctttgtcaaaggactaagaaaagagcatatttcagcagaggagtgttcccatgtgggttgatttcaacttgggtatttctaaaagagtccttgtgacatgtgtccagtggaaatggttgctcttttccagactggattgaggaatggagcctgtttgatttggttagtgattctttgacatactaatctcagcgtttgggtctccagcatcctctgaagatgtctagactagtagaggctgcctttgtgacctgacattacaacattggtcaaaccagtcctctgataatcagaagaacatgtcataattgtttaaaaaaaaaaaaaaggcaagaatttctctccaaggagctttaataaatgtctcattccagataatgtcataccagagaaaagtgcttgcttttagaaaattatttacatacatatataaatatatatgtgtatctatacagttatgtatcaaaattttaagccctgcagaatttcaatttgttagaaatctaacagaaaaaaatttctatattgaaaggtaatagaatttaacccagtgagtttactcaaggatttttaaatttaagttaataatttcagagaaaataaccatttgggtgtggttatagtttagtatccattacctcaatccaaggaaaattccaggcattcctcaaccatcaggaaaaggtacagtgtgaaggaacagttctcagccaaatttcacattcttgaggcaacagaaatcaaaacactcagagccattgagtggaaaaacaatttactttattcctttacacaaataggcttgcattgtttttgttttaatgtgattttggtactagggatataattatttcattccaggaaataataaaaaaaaacagacagagccaatacatttctttttttaaaggaaacagcaacaacaataaaaactcagcaccaatatttaaaagcttttccaaaatgtaaaagaagtgtttagcttgcaccatgcataaaggtgcaggctagttgaaccaggaagcatggcacttcctctggagaaatccagaaagagttgcttctaagctcccttttccccctgcaggctcttggcaattgtaggctttagcaaatccagaataattttcaattcaagctaaaataaaatcaacatttggaatgtaaatctgatacacacacacttttctaagtcaaacaacatatttcaaaaccaaaaataaataccttttagataatcagttattttctttgtctatactgggcacccacctactagtgccagtaaattcaagttgaacagatttttaaaatcactattatctgggtatgggggaaacttccccacttttgaaaatgttggtagaattataggaatgtctgtttgattatcattaccaaagtgtcatgacagtatgcctttgtagtgaactcggattttcaggagtttgaatagttggatattttaaaatctaagaagaaaaggcctgtttccaatgttgttgaagaataatgaactctattaaaaagtggagaaaaagataatacatgtggtcaaggttgaccacaaggcccaggcacaactaccttggcgataatcttctagattcgtaacaggttagagctgactttttgtttttgttgttgctgatgctgtgtgattcagacttctcagcctaaccaggaagagtaagtggaaatggtagatgaagaaggggtagagctggtgtatctataactttctgatatttgtctgccaaacttgatatattagtaatttttttatctttagctaagatcaagtcacccctgaaacaacaggagattctagttttaaaataaggccacaaaaatccttacggaatgaagaatggcaccccagttggttgtataagtctcataagataatgatgttgattttaaatatggatgtctcaatgcctgttttctatcaatgatttgtttgtttccaaggtcggggagggaaagaggggagggtttatctgttttagaaagtctcagaatacttataaaatacagaagtagttattaaaatatataggacctcacataggtagatacagaacttaccattgaggctgatgggctgttgtgtgaatcacacaggaccttaaatgaggctcattattctcacacaccaaaatgactctgacagcctgaagcagttattgctagagcccaagctttccttggaggttttggagttaggttgattggaagtaaccagctaataccttttctagtggagaaaaagacattgctaccagcttgttcatcccatagaagtcttccactctgctccatttttagcagcaagcatttcatgtagcataaaccttggcagataagtgtgcctaaggtttatacagtctgtccgcttggatgtatacaaatttagatacatattttaacatgtgttctcatagatgactttataacaacacacattacctataggtgtctagactgtgtacatacaagtgtgtacagacaagcttcatacgtatatactgtaatccgttacaacaaataaattttaaatcatcgtttaacatgtatgtggtacttctacagtgtacattgttttcattatttattgtaacattgaaaaccacagtgcagggaaaacaaaagtatcccagcatcttcatcctgtacacttggaattaatttcatttgggcatatccaagataaactcaactttcaagaaatcttgtatattatttaatcatctgtgttaggatgacacctatgattgatgacttcggttgaatagctttattctggatttttcataactaaagctaaatccaaagacctgaaaaaggacaaaaagaaaaaaaaaaaaagaaaaaacaaagaaaaagaagaaaaaataataaagtcaagcgcaaactgatggggagacagtgggctctggtttccaggattgagacaatggtactgcggtcttggggagactgcgttagctagtggggagtggtgatttttttcatgcttgtcacatctaaatggtctttaacatgagaaagttttagaggttataatttcctgctttgtttttatttagactatcaaatgaagttatacatgttgtcagtcaaaaaatgaagacaccctctgccccaccccacagaatgctttttatcttgtctctttgggttatgacccaacaagctaagtaccattaatgtaattaacttatttaaattagttcctagtacataaatgtataggatttgggtaattatttaatcatccttccttagtttgattctactccttgtacttatttatcaaaacctagaccaatggtgcatcagagatgcaaaattctacttggaatactcttgaagtttagtttgctttataaagcagtgaaattctgttacagacagggaagaaatacaggttacaaaaagagaatttgggatattcttccctcttaaattaacttttaaaatagtctaagtaacaatttttaaattatttaacttaagttcgcagccccacctggtaccaggcgaacttcacctcttaattattgtggccctcggagccttcatattgtaacttatttatttaacttattcagcatctgtgaaaggtgcactgtatagtttatatttttaatttaaaacaacagagagcactgcagtttgtttgctgtcagaacaacagagcaaattttgtggacaagcaatgactattcagcctgaacctgtgcattcagaaaacataagctgagaccctgcttcaccagcctggatttcggggcttctatacagaaactggaaaaataaattttaaaaaaatcgtaaacaaaaagagagaaacccttacactagctgcttccaagaatgaactctgtgtgtatgtaaagcaacaaaacaaaaaaggaaaaaaacaaaaagcagaaaaaagaaaaaaaaaatgaaaaactttctatttctagtgagaaccaaagaaggctacctcactgactttttccatttgtaattttaatcgtgttgatgacaccaaagataccaaagatttctttctctgtgcggtctgcattttgcttgtgctcttttataatttgaacgattttctctgacatatggtatgtacagccacagctcagataccccaaagaaataattatctatgcgacggcggctgctaatttggaaagggatattttctgtgtttctcttatatgtttgctgtctgctcgacatgttcaagatgcgagttcagatgctgctgtaattggattccttaaattctgattacaaattgaggaaggaaactggttggaaatggccttcagtcctagccatggcctctatccccgctgggacctgtcacagtaaagactgccaattactgaaccacagaagctctgaccattgagtagttgagctggaagagaccttaggaatcatttagtccaagccccggtggcccagaggaatgaaatagttatccaaatcaaataactcttgagagtgaaagcccacacatgcctcctggttcctgccccagtgctccgcttattgtacagtgctacctctgcatgagagcggtcccacattgacaaataggatggtggcaatcctttagcaatgagcagggactggggtttatctcttaacattttcagctgtaaaattagtcacaagcattttcagtgtcccattagtacatagtcacatatggtcggttgcttcgtgaaggtggcctgtcttgaaatactagggctcatacgggatttttgccctaggaaaaacatgttgatcccaatgatgtgatcacttttgaacctttccattacaaagcattgtatagataactttttaattcagtaggaggagaaagttcattcttggcctgttggctttgattattatgggtactttaaagtcagtatttatcaagaaagggaacttgaccaccattggcacatgtgacatttaagctcttcagccttttcctttttagttgtaggtgtttacatttcatttctaagccaactctgtatttatgagagaagtttaagccttacatcatttgatactaaagggttatttgtggtaaatgaaaaatgaccccaaaattacagaggaatatgccagtttaagaaatggctacttaaagttgcttctctctttccttcttactcatgaaattaattggtcttcttcaagtttctttagattccattaaatgattaaatcactattaagagccattcatcaacgtgatttgtgtgttagccaatgaatctgtctcagcttttgaccaaatgggttttagacaaatgcaaagatctgcctctagtccatatggctctttttgagtgctagtattttgcatttcacataatgtagttattttgagcttttaaagagagcatttagacaaagaagcaaagagaggaagggaccaatcaactcatcagttccatgcatcaacaaagcatagctagtagaggaatataaatgacagattgacaaactgtaggaaacactgttactctctttctgaagttttcaagcaccatcctatgtgaaagttccctcctgtccaaacaagctcaaggcccatcttctccctatacaaggcaaacctgtaaggccttccttccaaagagtacattgctttggttttcttcctaaattcctattggaattagaactctcagaatccctgggagacagagcaaagatgacttaattcattgagcagcagagctccctataagtgaacatcaccttccccatctttcctactgccacacccatacgagagaggatctagaaagagcgatggcagcctgaacacagaaaacatccccacttggcagacctctcctcagcaatccccccagcctcatgcttcacttgcaaagtgtgacataaccacgggacgagtgccttgcttgaaccaaagcaacgatttagccagtctggacctctctgtgctttttttaattcttcctgtgaatacctcagcttcaactgggcctccatacagtcagttggtgggcttattgtactgtggtgctttgcaatgcaaccctgcaaagaacaagatttgtactaataccaaaggttctttctctatgtctcctcctctgcctccctcgttcttcccttttttctagttcttcacggttccaaagctttactatgaacctgggcatgttggcaatgcagaccgcgcaattccttaccgaattttctcagatatacctcatagacaatagtgtttagagtaatgttattatagcgtatgtaataaattattcactgtttcttttggtaactgtgatttaaaaaaagaaaaaagaaaaaaaagctttatacgttttaggttgtgcttttgtaatagatgaaaaaaggtgcgcttaaaaagaaaatgtatgtttttttccccctttggattttatttatgctggattggggaaagttgcagaatgagcccaaagtttacagtttcatattttgctgaagaaacaatctgtgttcatttgctctgttgaaaagaataattattttctacatttgtgccacttggtctgaacaattaattgttccgtgttaacagtgtagtattatgattagcaactgccaatcagtgctataattttatgcatgaggctaaaaatttagcagtgtgatgcattgtggtcttaatagcaacatttttcattttgaactagatcttcccctttggttcaatggactttatttatgcatgggcgcctattgtttgttagcagttgtggaacagttgtgtatacattaaactgtgaaaatgtacacagttcagcctcagacggtggtaatattggttttattgggagatgtgtcacctcgaaaataccctttacatctgttgggatctgaaaatgagtcacattgaattgggttccagctttataatgagaaacgttattcctaatttttgagttagccaatttgcattccacaaattgggatcctcataacccaaatatatcaccgtatgtgagagggatttgaaagcgagtattgaaaaactcacctttgcatatttaatttccaccaaaaggagttattttggctttatgctcatgaacttagacctaactggccatgtatatgtagatgcaaattcatctagctgtggccctctttgatctctgcttgggaatggctatttttgactatgcgtggtttcttctcgtattttgtgatcaggtcagctcccagtagaaactcaaatggcatcaatattactaactcttctctgcccacttctcttttgtccactctcctagacattcccaccaactgttccagtgatttgggcaaaaatacgcagccatttcccaaaacttcacatgtgcagctatcatggctgtccctccctagacttggaggtgactctcacttaatttttacctgcccaacaatgttccatctaccatctaaaaggtaatataagaagaagttttgaaacccactttaggaaaaccatcttctttaaatccttcaattatctgaggcctctatatgtcaaaactatttttcagttgcaggggattgggcaaacttgttctttcttatacttgggttcaaagacccattctccagtttcatatttcccaaaccaaaatgcttgacataaagccaaatcaactgccaagcacactttattttgcataggagtatgcagcctagggaaccttggttgaaaagcagcagtctgctatgcaaaatattggaaatcactgacagtgtagcattcatattatctgtcaatgagggtatattgggaacgtgctctcgtgaataataaaaagcaacatatttttatttggccttataaattaggttgtggtaatgtaaactttgatatatagtctttttatttttctcttattaatctgccaaagatgggaacagatacaagaatttttcaaattggcttttgtaagacaattgatgattgtaatagtgtttaatcttccagaaagctttatatgttgttccacaataaaattgatatttgtttcagcaaagttttcctgacactcacaaacccacaaactgttcctcttaatgcagatattgtagaatctacaaagttcaaatccatttttgatccaaagaaagtagaggagtatttgagacatgagtgtacccagccctttttttaatcacaggcaatgcatgggtctggctggttacactttgccaagaagacttgtcttatgaaacccaaggtatattttgttatgccattttatgtccttttcttttaacattgtggaaagtggtatgttgaatcaagtgtaagctgagttttccagacaactgaagtagctacatcatgaatgttattttgttattaaagggtttttactcagtgctttgtgccaatggatgtccttttccttggagacacataactacaaaattacctcagcttggcctggttttctctcctgccctcttggggaaacatgggcctggcctgggaaaaggcaggtcatgggctggaaggtaggttttggtactaggaagaaatctctgtatctgtcagctttaaagagaactgggccaaaaatctctaacctcactctctctggactccaacacttccctgcaatcctttggtcttgagcatgtgccagcatgaaggcagactccagttcatacatgaaaggcaagaaaaagaaaatagtaaccttgaatcttctgtgggccaccaggcactcacctttccccaccttgcacactatccagtcaaggctattgcagcccatctggtggctttacatgggacattaccaaaggcttcttcctccatcctggggttgcaaaggatccaggtcccctccatccagtggggctcttccacatcagaagtccccctcccaccatcctctgcatcctgtttagctatcccatctataccttttggagatgattatttagaaaacaaagaaaggtatggaatggggtttcctattgtttgctaggttatattttagcaattctcaattctttgatctggaaaaatacaagagggaaaaggagaccccactatctccctgtgctttgctcccatctcagggggcaggggcagtgcacattgcctatgctgttgatctgtcttgggcgacaggctgaatcacagctattgccccagccaaaaacatggcccatcaatgcctactttatctctgcttgaaaatcctattcaaaaagttgtagagtttgaggtttttatccccccatatcctttgctttggtccagtttggcctttagcataagagtcagctttatctctaggaaagttttttcagattatgacaaggaacctgccacctgggaagaaaagagtccgaagactagcaatcggataggtagtcataccattaacagatacttccttgaaggtagaatattatttcctttctttacagttttgtgttacacaagtccaagtggtgccagcaaacttcttaccgtgaaatgttgtaaaacacctggcatactgaaatttctgaaacaaaaacacaagctccacattgataacttgataaataaccactaaagtttagatgcagggactgagatgatacaggcaaaatcttggtgttggtttctcttttaattcgtatcttcgatcacctaacctttctcaatccaagagcagttcagtcttttctccccaagtctaggatgccaaagagcatcataggaaaagataattagggattgaccagcatttcaattagttctcttcttcatctttgcatttctcaaaagtgttctcctggaccagagggaaagagctggtccattttttttcattctttctattcaaatttttccacccagacaatactttattaacacagatactgtagatccttccttggtcagtgaattattacaagaggagctatccttccaccaaagtgagtgaaaacaagttccagtatcttttcttccatccagttttgttctcagaatccaagtcagtcctgggtcttttctcactttagaccctggcctcagatgtgtttattcttgctatttaaaaatacctttaaatttcacatgctggcctgcagaacttgcatcctttgttctatactgttgactgcttgatggtattgaaaggtgactataatgagggaagaaaggaggaggtaaagagagaagaatttgtcccagatctgtttaaagtttcaaaatttaaaaagggacccattaaattatgggaaaatggctatagagtgtgagcctccgttgaccatatgctcaaagaccgtactctgccacctgccttccaggtagctattctagaaactcagtcctttgtggaaacccaactaccttttaaaagtctctttccagattccaaaaggacaagagatcagagagtcacatatacgcctcttgttttattttcttgctttcacgggtattattgccaagaaaatcgtagggaaaaactttaaacttttcttttcagttgatccctttgacatcacctctcatgtttaaaatcaggaaaacacacccctaaaatttgcactctcttccgttttgaaaaagaaaacccacacacaaatgcacactattaccgtctttcaccctgcgctatatttccaaagtgtattataatccagatattgccccatctcaaacatgttaagtcagactgtgctgaaagactttccagggacggtcaacagggtatatgttcagtggctgccctgaaatcctggtggggatgaggatcacgcttcatcatcaaggggatgcccatcccctgataagctcccagtccttttggaagatttctttgaatgttaattgcattttcagttttgctcatttcccaccccaatgttttgtctgcaacatcgcttacactggattctttctatttttattcctatcattaaatggtagtgctgtaaattctgcaattaatgttaaataaactgctttaattcattgaccatggctcagttgccttctttttcttttcatggaaggaattaagcactcttccccctacagcaccccattgtggtttcataaaaaaacagtaaatttgttcttagtgagactacaatttctatctctgacagtatgcaagacacatcttataatcaacaaacctgttatccttgttataaatcacaaaagatgagagatgctccataaaaactaccttttttcttaacctgttaacactttagagatagcctgtcctagacttatctttgcacagattttgtatgaggtcacatatggtgagtcaaaagaaggatcatgttattgtcaccctatggaagaatcaagaaaaatagaccaaaaaaaataaggcctcatatgaaatctaaaccctgcaacaaattagttgtatggctttgagcaagtcatttaaatcatctgggcttcagtttctccacctgtacaaggtcaaggttaaacctggttttatcaaaagtcccttccatctttgcatttgccccagatttttgaaaatactaacatttttatacagattttatcttggcttattattttctctaagttaatgagctaatgagtttgtttattcgttttattttattttattattttattttattttctgagatggagtctcactctgtcacccaggctggagtgcagtggcacaatggctcactacaacctctgcctcctgggttcaagcaatcctcccaccacctccgtctccaagtagctagaattacaggcatgcacccagcttaattttttttttttttaattttagtacaaacggagtttcaccatgttggccaggctggtctctaactcctgacctcaagtgatctgcccacctcggcctcctaaagtgctgggattacaggcatgagccacctcacccagcccatctattcattttaaatttagatatctgagattggagactattattctaagtgatgtacctcaggaatggaaaaccaaatatcgtatgttctcactgataggtgggagctaagctacgaggatgcaaaggcataagaatgatacaatagactttggggacttggggggaagagtgggaggggggcaagggataaaagactacgaatatggtgcagtgtatgctcctcaggtgatgggtgcaccaaaatctcccaaatcaccactaaagaacttactcatgtaaccaaataccacctgtaccccaataacttatgggaaaaaaatttagatatccacaagcttcaaaggagtcccattgggttaacccttggtctaactcacctatagcccaggccatgaagcactgattgccttcatctagactggtggttttcaaccctgggtgcacatgagaatcacccagagagcttttaaaatatactgtacctaaagtccatcccagaccaattcatccaattccacaagtgtgggcctcaaacattggtgtagccattagcttttgctagagttagtttgttagtgggaacaaaccaccctaaaacatagtggcttaaaaagcaactatttttaactcataattctgttggttgtcaatttgggttggtctcagctggttagttcttctgattgggctgggctcactcatgcatctgtagtcagctccccagttggctgggggctggccagtctaggatggccttagtttaatcaactgagctctgctctcctttatcatccagcagactggcctgggtagggttccaagagatcaagtgaatcacacaaggccccttaagaccaaagcatggaactggtatgatcacttctgctgcatcctcctcactgaaggacaccataggtccagcctcacaggggtaggagtgaaaagagattccacttgttgatgggaaaagctgaaaaagcacattaccaactgagaagtgaaagacagactgtagccattttttacaatctaccacaatctatatttttaaaagctctcccagagattctaatgtgcagccaaatttgcaaagcattatttcaaagcctagtgtttttctatttttttctcacaattcaacacttatctgtgttaactccctcaaatgcctttatcgtgttgcttgaactcattgtatgaaaaaacaattcacaaccttcaaacttgtagagtaggtatcattacaggctgaatttatacagatgaaaaagtcttccacaaaccagagggatttagacactggttttattggcaggtgaactcgcagcctcagctgctggtggctgcaaccactcactaagccatcccatgtccagggctggtgggaagccctgggaaggcaggagccacacatggagttctttctgttggaggaatcttgggctgtctcaggcacatgctgagaatattactgggcctaggcaccgccttggggtccatcatggagatcttgactacaaagcagcatggcctctggttctaggatgaaatccctgttatcataatgtgcttttgcaccattcttcctcgaatgtcgtgtccttatttattcgcagacctttggacagaaaggagcatcttaagagaacagttgcataaatagtctcagcttatgccaatgctaaactagataatcaccaaaacctcttccacctctgctatttcctgtttctaatgatccatcactcttactcagagaaggaaacagtagctaaacctggcaaatttcaatgctaagaatctctggtctcagtttagccacatcaggatagccaaactaagagaaatgtaaaagtctaggtggggcctttgaatgagagattaggctcattgaaggaaaatacttccacactttgggagctcattggcatgagcccatttttttagcctctggttaagggcatttgatggtatgaagtatcctttagtcaaaatgctttaagttattggtaactgcccttgcaaatctattctctcacttttgtcttctccctggattcttccctccttaagtggggctagaaggggggaaatcacttgcaaaaataaaattaaaaggaagaataaatccatgtggacccattaagcatgaggaagcattgctcagtccacagtggctcactgagcacaattatttctagaattaatgatggtggttgccaaacttagaggcagccactatgctgtcacctccagaatcctccttccttgatctgcacaacaatcatttaggggacataggtagggcagggtgcaacaacctcaggaccaagaggcagaattagcattcaaactcagatgtcagagttgaccccgtgcagctggtcactcggtgctgcaccatggagacctggaagttagtagggcatgcttcctcgggttgcagtgatagagcatatattaccaagtcattcctgctatggagccatatcagctgtattccaaataagtcacacagacaaaaaaaatgccaggagttcagaagaaatggggatcatgccaaacggggctagttcaaaaagggctctctcatttcataagatttccaagtactacagttttattactaaatctaattgagcataactcaatgcatggccaagtgatctcggtttgtgggagtagattacatttctgcccccacgtagctgctcccaggtaactaacctaactaccccaggtagtattttcctcagattatcaatatgtaaatgtctggctcatgcctccagtagtacttctagctctgatttgagagagaaaccagcggtttgagtcagaagatgttaattcatgtcctaggcctacctcttactgatatgtggctctgggaaagtcatttaaattcccatctataaattggggataagaatataaattgtatcactgtcctgcctggttcacaaagttgtgtgtatatatgaatatatcgctattaaagacaaccaacattttataaaagagaaatctgaggctcagggaggttaggatacttggccgaggtaacacagtagtggagccagaatttgagcccaggatcgtcagcttcaaagcccacctgaaagtgtcaactaacatgaattcccctagtgacaggagagagctgcatcatggcactgtagcgaagcatgccacaagacgtaaactatttcttaacaattagctttgacaatggaagtgcaactagtagaagaatttataaacttcctcagaaataatgccgcatatctacaactatctgatctgtgacaaacctgagaaaaacaagcaatggggaaaggattccctgtttaacaaaatggtgctgggaaaactggctagccatatgtagaaagctgaaactggatcccttccttacaccttatacaaaaatcaattcaaggtggattaaagacttaaacgttagacctaaaaccataaaaaccctagaagaaaacctaggcattaccatttaggacataggcatgggcaaggacttcatgtctaaaacaccaaaagcaatggcaaccaaagccaaaattgacaaatgggatctaattaaactaaagaccttctgcacagcaaaagaaactaccatcagagtgaacaggcaacctacaaaatgggagaaaattttcgcaacctactcatctgacaaagggctaatatccagaatctacaatgaactcaaacaaatttacaagaaaaaaacaaccccatcaaaaagtgggcaaaggacatgaacagacacttctcaaaagaagacatttatgcagccaaaaaacacatgaaaaaatgctcaccatcactggccatcagagaaatgcaaatcaaaaccacaatgagataccatctcacaccagttagaatggcaatcattaaaaagtcaggaaacaacaggtgctggagaggatgtggagaaataggaacacttttgcactgttggtgggactgtaaactagttcaaccattgtggaagtcaatgtggcgattcctcagggatctagaactagaaataccatttgacccagccatcccattactgggtatatacccaaaggactataaatcatgctgctataaagacacatgcacacgtatgtttattgcggcattattcacaatagcaaagacttggaaccaacccaaatgttcaacaatgatagactggattaagaaaatgtggcacatatacaccatggaatactatgcagccataaaaaatgatgagttcacgtcctttgtagggacatggatgaaattggaaatcatcattctcagtaaactatcgcaagaacaaaaaaccaaacaccgcatattcttactcataggtgggaattgaacaatgagaacacatggacacaggaaggggaacatcacactctggggactgttgtggggtggggggaggggggagggatagcactgggatatatacctaatgctagatgatgagttagtgggtgcagcgcaccagcatggcacatgtatacatatgtaactaacctgcacattgtgcacatgtaccctaaaacttaaagtataataataataaattttttaaaaaaagaatttataaacttgcttgttttgccctgaaatgactattcataaaaattgccgtgagctgactaagccaatttggttatgcacaacatttaggttcttgtggtagctaatggtagccacccaaaggttttgagatgggcaagagtcaactacttccccacaacttcttgccagattttaaagaaagtgagtctgaaaccaaatgttgccacatataggtatttacttaacatgttttatttagaaaatcaggcacagaaccacacataccactcacggtgggagttctgtgaagtgtgagatctctgtattattgggagtcctaaccatactccagatagacctaggaacattttggaggcaggctttcattagtccttgggcagcatcagacgacaggtaatattctagactgaggactgaacacaggaacttttagggatcaaacctctcctctattccctaaagcaggctaaaggtttcactgaagtcttatactctgtccatgcaagagaacagagttagggcttccccaacccacctatctcaaatacctttaattttaccagtcaccagaatccatttataacattttccatgatacagtgataggcgactgtcttgtagtagactgagatgtggatggctgaagcactgttagtgaccagtctgcagtgagaacactctgaaataatgttcaccaactccctgttcttggttaggatgatttactgcctccatattgaaccttgaacaaacagacacatgagtaacaccaagctgtctgtgccaaagtttattaaaataagtcacagtcattgcaacaaagaagaaacatagtcccatcctgttgaagaccatatgttaatttcaatataatgacactttatgtgtgcatttattcatctcattttttcctgcagcctatactgcaggtattattattattattcccattgaataattaaatggtaaaagtttaaatcatcttccactgcctcatgtaataaggacagcttacatgtgtagatatttactctgtgctaggtattgtgctaaacttttcacgatttatctcatcttgttctatcttgtgaggcaagtactgtaattatccccacaatacatatgaaggaactgctctttagagaaataaagtaacttgcttcaggtcacacactagacaggctgactccaagcctaagctattattagcgtcgagttttccttcagccaatggcagagcttatcctcgtattcactgcttaggactctgactcatgtgttctttcaacagaattctgattgctaagcagctgagatgggtagaagtgaaggtaactagtgctaacgccctcccagcatctccaatataaatgcattcacagccgtgatgctgtggtttatggctgctcagaacttgctcacatttccaagtcttcatttcacccttggagaactccattcaggacatgtatgtagaactccatggagcttacaaccaatgatttgggatgtcccaaaccacacagaagcatacagaagtgcaggtgagatatcactgtgggctgtgcatattcacaggattgcaagagctgccacattgaaaccagatagaaagagcctggtattggcgtgaactagtggctacaaatacatctcctaactggggcactttgggtaacctcacttgagctttaaatggtctcaaaaatcatcattgccattgttgtcatcatcatcttcaccttcaccaccctggctgaatttttaggagaccagtaaataacactcctgctttctctttctgagtttagatcgaatagaaataagacacaaaaatgagagtctttttaaaaatcagctttattggtaaagctgattccccccaagctgagcttccccgcctaaatctgcagtccaattctttcttcacccgtcacagggaggcgggaaggagttactccaaagagcacttccaataaacctccacatgtaaattttggcttctcagagtctgtttcccagggaacctaacctaagacacccatttacatgcctccctttactccacctcttcccagaactggcctattctacaattagagaccttcctttcctaaggaaaaatgtgcaaaataaaatatcaacgttctctaagatctgctgtgagaaggtcaaatcagaacaatggacagcctccaaaaccatcctccttcccatgcttaatgactgcccactgctcctcagctgcctccctctggctgggcctcttcctgctcagcattctagagcagccccgcaggctctcctctacccacagggaagagcagaacaggagacaggaggtccttgttccttgatgggctgaagaaggatgttcatggtccactgtaccaatgaggcaactagtatcccttcagagaagcagttgcaccttccaaacccaatctggccatctagctactcaggattgagctatgctcaggcatttcttccagggacagctttcaaaaaccacaagtctaagaacaaagaatgagtttgtacctcctgcacgcaccatggaaaaccttacacacagagagaatggacagtagcctttatggaatatgagataaaagtgctacctgctctgacattgtgtctaaaaccccaccaacacagagtactggggggagggggcattgtcctctttgggtattcacttttgtttatctttcctttaaagtacatctcttacatttatatatatatatatgcaacattttttgttgtcacagctgaagaagtgttgctggcatctaaagggtagaggccagggatgctactaaatatcctgtaatgcacaggatggccacccgctacaaaggttctccacccccgagtgtcagtagtccaagaatgagacactctgctccatacccatttccttctctcatagcaatgttatcatttcttttgtatgtgttcacataaaatctgcattgtagggtgcatgcattttcaatttatgtaactagtattatattagattatctcacgctaccttatggtttatactgtttttgaggtctgtttatattactgtgtgcactctaatgcattgcttctgggttctacatagaaatccacagaatgcatcaccacattgttcccatccatcacctccagaaagggatccccaggttgcctcctagtctctaccatcataaactttgctacagagaacatccttgtgcatgttccagtatggccctgcatgagaacatctgtggggtaaataccaggagtggaattgctggatatcaggtagatgtattgtaaacttgaccagatattgacagacatctctccagaaagactctcccagtccatactgaaaccagcaggccatgacgctttgtaggtccctcatttaaaaggtactcttcttgaaaatgcacataacctatattaagattagcatattaaatcattattaccttccagatgaatccatcagaccatcttcctcacaggaagtagcttcagtggcctgggtgcctaggctagaaaggcttcaggtaggggttataagtagaaagaaaagtgggaggacccaaagacagaccctcttctgccctccgggaaaattttcttccctcctgaattcgctgccatccgttttaatggattgtttgtgtcttccattattaaactttctttttaacttttataacttcaacttgaagggtgttttctttttccataagcagtctcagcctaaatcaaggggaacaacctagagaaacagaagcacgcagggttcagacttctgagaggcattcatgctcatcgcggcaccgctcctgcttcctcagtcattcagctcgcccacgggatcaataaagcgatcaataaagcgatagaaccacaaataacacaggcctatcagcaatatattagcaaagagtgtttaaaagcaacttttaaagaagattcaataacattcgactccaaagttggccaactccaatgtcctgaagctcaagttcattcctaccgagttagcaaatgatggacaacgagcctgactgtcagacagatgggcctggactgctgggaaggccatctggggatgccagaggggttggaccgacaacagggagccccctgggagggtcttatgctcttgatggcagtgcttttgagggccaaatgtcctcagaggtgggtcaggacaaaatcttctctagaataaacagctccttcaggtaacaaaagggattttgcaaaaccccattactttctaatacttttttttttgagacatagtgtcactctgtcgtccaggctgcagtgcagtggcacgatctcagctcactgcaacctccaccttctgggttcaagtagttcccctgactcagccttccaaatagcttggactatagacatgtgccaagacgccagctaatttttgtattattagtagagatggggtttcaccatgttggccaggatggtctcgaactcctgacctcaagtgattcacctgcttcagcctcccaaagtgctgggatttcagggtgtgagccatcgcgcccagcgtctaatacatttttcacctcagaacaaggagtagctactaggaaatccctttttatccactctcatgggtcattaggcaactgagctgagccctggggttcccaatgagcaccacccccctgggagtttcaggccagagacagaacacctgctctctatgaggtattggacttgatgttcaatcaggcaaaaggtaatatatataaactactacaactgggcctcacacacagtgtgagctctacaagtgattgctattcttattgttgatcatcataattgtcatcatgattattagattctgaggattcaaatgtacgtaagacaaagtcctttctttcagggagtttgtaggtaagtagtgcagagacatataagaaaccattaaaaaaataagcatgtagaataataattgaaagttacaataagggcagtggaagaaacaaaggcctggaagagagaattgggatgattcagggaattgtaaatgggattaagctgtaaaaaagaggaaatgctgctgggcacagtggctcatgcctgtaatcccagcactttaagctgccaaggcaggaggatcgcttgaacccaggagttcaaggttacagagtgagatcctgtaagcaaagcaaagcaaagaaaagaaaaaagaaaagaagcaaagaaaaggaaatggaaaaggagaggaggaaaggagacggggagggaaggggaaaagctgggtcccgtggcttacacctgtaatctcaacactttgggaggccaaggcaagcagatcacttaagccaaggaactccagactagcctaggcagcatagtgagaccccatctctataaataatataaaaattgtctgggcatgatggcacatgcctgtagtccaagctactcgggagggtgaggtgggaggattgcttgagtccggtaggtcaagacttcagtgagctgtgatcacaccactgcactctagcctgggtgacagagtgagaccctgtctcgaaaaaagtaaataaataaaagaagaagaaatgaggaaatgctatggcctatggtagctttgggctctgtccacttagatcttgagttcccagaattttcttccctgattagttgggggttcatatgaacataagagacattttgcacaagaaactggaaatcaaaagtaaatgaactggctttttttttttttttttttttatcctaggaagcacagtgcagggcaccggtgactggtgctgtcacagattacacgtgctgtccccgatccccttgttggtgcagggcagcagtccaccccgcagctcctgcccttgctcctcctttagctgctccaaatcctgggctggtgacagcagctccatgaagggtgccagctttttctgcagcaccagcatcgtgaaagttgactgtcaggaggaggcagtgagggacggatgtggattccagctcatccgcggagttcccactcatttttcttccccccagttcacattcttagattgcttgtgcttttgctgccacacctaagatcccctaatccaagatcatgaagatttacacctatgttttcttcgaagagttttataggtttagccctcacatgtacatgtttgatccacttcagtttttgtacatgttatgaggtagaggtctagctgttgcatattttcccagcaccatttgttgaaaagactgttctttccccatgcattgtcttggtagctgcactattttacattcccaccagtaacgctggaggattccaatttctccacatctttgccaacatttgatattgtctgtctttctgattatagccatcctaaatgggtgtgaagccatatctcattctcattttcatttgcactttcctagtgactgataatgttgagcatattttcatgtggacattgatttttaaaataaactttatgttttagaacagttttaggtttggccaggtgcggtggctcacgcctgtaatcccagcactttgggaggccaaggcaagtggatcacttgaggtcagaagttcaagaccagcctggccagcatggtgaaacctcgtttctaccaaaagtacgaaataattagttgggcatggtggcacacacctttaatcccagctactcaggaggctgaggcaggagaattgcttgaacctgggaggcagaggctgcagtgagtcgagatcccacaattgcacgccagcctgggcaacagagtgagactctgtcaaaacaaacaaacaaacaaacaaacaaacagttttaggtttacagaaaaattgcaaagatagtactgagagttcacacataccccataaccactttccactataattagcatcccacattaggacagtacatttgttacaattaatgaaccaataatggcagattattattaattaaagtcctttttttttcagacagatttcctttgtttttacttaatatcctttcctgttcattccatgttatgtttaggcatcctatctccttaggcccctctaggctgagacagtttttcagacttgccttatttgtgacactctgggcagttttgaggagtaccagtcaggtatttcatagactgtactcctattgggatttatctgatgtttttctcatgattagactaaggctatgggtctgggggcaaccacggaagtaaagtcccattcttatcacatcatatcaggggcatacactattaacatgacttaccattgttgatgttgacctagtcacctggctgaggtagtgcttctctgtttcctccactgtgaagttactctttccctaccccccttccatactgtcctttttggagggaagtcactatgtgcagcccacatttaaagagtgggctgtctttcttcttttccactttctgtcccacgtttcccatcttttcaaaatcttcagctcagctcaatcctagacaggggcgaagagttcatttgcagtgacacagagctgcaagctgcttcccttcctctctttggccttgccaagcttggactcaggaggagcagccccatctttgagaaaagttacctgtctctatatctcccgttgcgatggagacaatagtgtcagagttcctacaaaagtcccaatctcagcagtttggtccagcattccctaaatatgcttcaatcctcaactcaggaagaaaaagaaaaagttcatcagatcattaatgtgcatgcacacacacacacacacacacacacacacacacacacacacacacacacaaagtgtgatgtagagcagaccctccgcaaaattctgaagcagaaggaatttatctttgatgtcctctctcttgccttttcaggctctccctagaggtcccccatgaaagcccccatcctggcctgttctccagtagccctggatctctttgcctctcctccttcctaaactgggaaacaataacaagctaattagtagctgggattgcaaactgtgtccaggacaggcagagcgggatggagacaccaaactctctctaggggaagaaagaggccagggagtgtgggttggcaaaagcaatgatttttaattcattcacctgttatttcttgagaactttgaaactttcctacttctgtgctttcaacctatagaaaacgcagtcatcattgaacagtgaaaaattgattctgcttctaggagtttctatttagccaggggatctagaggcagctttagatttacatttctatcactccctttccaagcctgattaaggtaacctgtgcttcccaattgccccgttatttttcatagtggttacctttggcttctcacattcccaatccaactccattttggaaatactagtcatttctcaaaaacttaggcaactttttccctgtgtgaagttttagaaaaaggtttattttcccctctaggcttattttacttggctgaagtcattggagacaacatagactttgcatttttatcaggcctctttcaaatgtgctggcactgcagttgaattccaatgactgcattcaatgatttgcagtagagactatcaaaaatgcccacttccaaagctttcctgttgagaaaagtccagacagcacagcatttactgtctatttatcctcaagataagtactctgtcgtcttattcttttcacagataattatgagcactctcatttgggcccaacatttatgttaacagccaaaaacacacaaaaagtttaagataatccactttccttcagaagctcgtaatccaattgggagtcaaggtacacacataatattgttaaataacattctaaagtagtgtgaatatgtctgaaataagtactctaggacttacatatctacagtagtcaacttatgggacaagccctcattccaacagtactgccatggctcaaaatgtgtacatttgttacaattaatgaaccatccaattacaattaatgaaagatccgatcaatggacctttcatagggttaactccagtgctcgtttaacaatcacaaaagaaaaccagcttgtctatttcaatgttagagcttggttttgtggttgcttttaatattatagcttcctatttgatcacccactttctaaagctttgactagaaatgactttaaactataatcaaaataatatccattctcaaaggagtatttttcaacctgtttcattctcaatccaccagcctcctgccatcttgatttctatccagtctagagcatggaatttaatctctagtgacactctgcccaagctcttaactcctttgcttctgtgggcttccattccacacacatggaaacaccccagcctaggattcattccactttctgcctccttggctttacacccaggtcctcagaaactgggagttctccttggcttctctctgtccctcatcctttacatgattggtgacaatttcacttgctcaatatctctcagatctgcctctttttctgtccctctgccactgccccgtctcaaggaccctcatccatcatttcaatattggatctttaaaaagtgtcttgactgatctttttgcctacaggatggtctctctccaaatcagtgtcgacactgcagtcagatcactttttctaaatcattaatctgattttgtcacttcctaaaacaattccaatagttctccaataaacattttaggataaagtccaaagtcttagtgtgtctctcatggcttttcttgatctgaaatctgtccatcagcctcacctattaccatccagcctcccaccctagagccactggcaggtacctacaggctccatccacttgtttgcccctagccctttatataccctcttccttctttctggaatacttttcattggctgatgaactcctactcaccttttaaggcctatgtctggattgaaggtctctcctatgcccttccatgatccttccagttggggatctaccccttgacttgctatcgtcctcattgcactgtgagttgctctgaagtaagtgctgaattttactccttttcatatccccagaatctagcatgatgtcttccacataactgtactcaaaagtgtttgctgcataagtaaaagatttgatgccatgaggacattcaaaaggaaaataatagctaatacttgtagagaactcactatgcactaggcactgtcccaggcactttatgtgtagtatatcttctttttttttttttctgtttgagatggagtctcgctctgtcacccaggctggagtgcaatggtgtaattatagctcactgcaacctgtacctcccaagttcaagcaattctcctgtctcagcctcctgactaactgggataacaggcatgtgccgccatgcccggctaatttttgtatttttagtagagacgagatttcaccatgttggctaggctggtctcgaactcctgacctcaagtgatctgcccttagcctcccaaagtgctgggattacaggtgtgagccacggtgcccagccgtatctcattttaattattacaggaaactctgagagaggaactattgttatcctccatttcatagatggctcacaaagagtttaagtagcctgtcccaagtcatagtgggctgcaagctttcaaaaggcaattccaagagaagaattcccaggaccaccttctctccctggtaagagactgcaccaatgactgcattattggttactgatgatgtcacgctatttgcagctcttgccatcaggtacaaacagcccctcaagagcactgaagttatcatctaaaattacttttgctgaatgatgcttcccaggacctccatatgagacaacaaaagcagcaaggaaagttgagagtcgggtaaagatgattctttctagagtcaaggtgactaagccccagttcatgacaggcaattttccgattgattcttgccttttgctatatgagctggatgattgcctcatcacagaaccctaaacttactttgctcaggcttcctgagcacaagaatgggggggtaggaaaggctttgtcacagtagggaactttccacacttgccagagaagatcaacatgagacaaaggatgagtatatatgtgccacctaccttctcactcccctatggttatttgattttctgcagatcttagagctccagagagctgattttctgaccattcaagatgccaggatgatttacttacaggtaagttgataaattcatcctcctgctctatgtctgtaacaggactcgacggtgactgtacgtcaatgtataaagttcaacaaggaattttatgaacgtcaacaggtctcacggcttctgccccaagatttttcctgactctgtctactgccttctgacctcatttcccctccctcctcatcaaactttaggacattcatcttctagctggtcttgttcctttctcatcttccctcccttcccctaagacattatccatactacagctaaaattaaaatgacaaagcacgggtctgattatggtgttcccttgctctgaaaacctgaagtctcttcagttggctacagagtagtgtaaacaccgtaagttggcatctttcctgcttcccagcctcctatcccacttccctctttcttgctccagccatgtgtcaccacttacttctccccaagaactcccatgcactttcccaactccatgttggaaaatgcctaggaatatccttctctatcccatctgcctgctgaggtactcactgtcagtaaacgaagactaggtagttcagataaatccttcctcaggaaataatgaggaaatctggatgaaatacagaaatattgtattaaaagcatcaacaacctaataagatggtgaaaaactgctaaccaaagtgtgggaggggccaggcacctagagagataaacatcgcttggggaagctttcacctgggagcctgtactgatgcagaagagttgagatgctgggatgtgcttttggcagtctctcaaaagttaagggaacaaaagatagactggtggcctaccaatggctaggatgcttaaggactgcaccgcaggcatttagatacctggaagtaaatcagtccacatgcggtcatctgttcagccaagaaagtgtcaaaacttgaatgtgcatcaagtttgctgcccaaaactgctagcatccccaaggattgtggcagaaacaaacaaacaaacatctctccgggggaagataacatcatatgaggtcataaatatttctataaacagtctttcaaacacaatgctcagcacacagtcaaaataaccaaacttctccaggagtggggcaaaaccagaaactaatattagtctttgataactcaagggtgcatatagagtagcttctcatgaatagaaaataagaatggaatacttcttaactaataaggaaaaaaaatggaacaatagtattaataaacccaaaagaaggcaagaaattaaaaaaaaaaagggaacacagagcagggggcacaaattgaagagctattcatcattcaaggtgcagctcagatatcctctttttccctaacaatcccttatctcctcccaccagtccagtgctctcttcatactttatttcaatttctaccataccgtttatcccattgtgctgtaattaattgttcaagtgtttactttcccagttgtattttgcacaccttgaaagaaggtgttctgcttattcatctttgtatcttcaatgcatagaacagggcttggctcacaatacacattcaacaaatacatattgaagtaaatttagttgaaatgaactaactaaaaaaatactgaggtgtgatgctggtggagctgtcagtgattgttcctgcctgcagagaggagcacatggctcaaggaggctatcacgttacttattccccatatagagtattaatacaaaggcttatgacccaagtggtgctaatcttccataaaaattaggctgggcgctgtggcttacgcctgtaatcccagcactttgggaggccgaggctggcagatcacctgaggtcagaagttcgagaccagcctgaccaacatgtagaaaccctgtctctactaaatacaaaattagccaggcatggtggtgcatgcctgtaatcccagctacttgggaggctgaggcaggagaattgcttgaacccgggaggcagaggttgcggtgagctgagatcgtgccactgcactccagcctgggcaacaggagcgagattccatctcaaaaaaaaaaaaaaaaaaaaaagaattaatatacaggccaggcacggtggctcacacctgtaatcccagcactctgggaggccgaggcaggcggatcacctgagatcaggagttcgagaccagcctggccaacatggtgaaaccccatctctgctaaaaatacaaaattagctgggcatggtagcacacgcatgtaatcccagctacttgggaggctgaggcaggagaatcagttgaacctgggaggtggagattgcagtgagctgagatcatgctattgcactccagcctgggcaacaggagcgagattccatctcaaaaaaaaaaaaaaaaaagaattaatatacaggccaggcacgatggctcacacctgtaatcccagcactctgggaggccgaggcaggcggatcacctgagatcaggagttccagaccagcctggccaacatggtgaaaccccatctctgctaaaaatacaaaattagctgggcatggtagcacacgcatgtaatcccagctacttgggaggctgaggcaggagaatcagttgaacctgggaggtggagattgcagtgagctgagatcatgctattgcactccagcctgggcaacaagagcaaaactccatctcaaaaaaaaaaaaaaaaaaaagatttaatatacaaagaaaataagagataattagatttccttttgtatcacacactatacaagtataagcttggtgattccagaaaccatcttccatcccacatggtgaaagtcacgtgaaagtggggcagtgcacaaagcaaaacagaaccagagttggtgagagagacaaatccctgaaaacattgaacccctggattcagctatgactgaacacatatccaccttgacttccttggctaatagccgataaactccttctgttgcttaagctaatttgatttgtgtttctgtggcttggaacaaaaaagagtcctgacaaatacaagagacttctatgagaaattctacatatgaaggctcttgcactagtttgtattgggatcggcaacaaggtatagatggtcagaagacactggaacactgatagatctgactgtaaggaacataaaaactcagtaactctgattttttagccaacagattagaattcatgcatccatgttctcactcataggtgggaattgaacaatgagaacacatggacacaggaaggggaacatcacactctggggacagttgtggggtggggggaggggggagggatagcattaggagatatacctaatgctaaacaatgagttaatgggtgcagcacaccagcatggcacatgtatacatttgtaactaacctacacattgtgcacatgtaccctagaacttaaagtataataataaaaaaaaagaattcatgcatccaaatgtgtattgattctttcatagtagctaccttgggaaaccaaatatttattccagccatttgacaagaactaagtgaaagggcaagagtttctatggaaaaggcccccaaattagaaggagcatgaggtttagaggcaggtggaaacatgagaatgggaagggtcaatcccagggagaggggatccagggaccatcccacaaagagcaacgaggtctggaactagccaagcgctagcagccagctcattgtccaaggactcttgagaagtggggacctgagcctctgttttgagtcttgtagacctagctttctggggcctaccattccctgcagagggcaaggcctgatgatgagtgaggtggaggagcaaggatgccccttctcatgggaaagctctgagacatgcccagacaccgtgtcccctgagtgctcatgctgctgagaatatgcagagcccacgaaccaacacattaaggtggatttgcttcggaccagaagcatgagtcctggacagcctagagagcccttgaatttcctcccttccctgaagaaatgagtaaggatgctataaatttccttattccattttcaaaagcctcagtgaaaatttgcttcctctctgtgtccatctctttgacatgtatatacacaatggccctgacaagaaaagtccctctcttgtatataagctgccatctctctccgcaccaccccccatgaatgataatacaatatttattaaggcttaaatagcactgttaagtgcacatgttgatttagaatgatggagtgtgtcagcgtacagaacaggaactcagccacagaccagggacccacaaaggacaaggagatatatcattagctaaagacccaagctagcaaatgtcatcagcagagacaaacaagtccttaattagggcttctttatacctactgttaacaccaatttttataagtgtattttcaaaaataatataacattatatatgcaaaaggttaaaacatttaaactgtacacactggtatgaaataaaaagcaaactcccatctgctgtctcccacacaagtcctttaggaaactcttttaagctttttttttagttcttctgataagttaccaccataattctaaacaatatgcatagatttcaattttttggcttatcatgattagataatatcaagtcatttgcactatttaatagaggaggaatttagttcacttgcaatattttcaatcatctctctcgattttgagtttcattatattattgtatttggttcttcgagtagtgacctttttatttttaaataatatacattatcctttatttttgtcccatcttctttccacaatatctcttgtctcatcccaaagtcaaatgaagaaagttgcacctacacttgcccttccccttcctgctcacaacttgaattcccctagcttgggcatcacctacacagtgtcaattgttagacgcacattctagtctataactgccttctgttttgattataaaaattgaaactagcaagcatttagttataactatgtaaatgtgattatgtaattattgatcactatagaaagagtatgatcagacccactgaaaaggaaatatgatcatatatgtcgctagctgactctctctcgaagaatgttcccaggagaaggtcaaatggattctcttttcttacattccatcagttgctcaaaaccaggccacgtttttggtggttttatatttgaaccaaagctttcttctctggtttttccattatttttttctctctggtttttccatttttttccttggcatttcaaattgtgcttcttctttcttgaatagagggggaaaaaaatacacctgtttctttcccactgggatgagattttccagcttcttcattgttctgcctgttaactgatccccattctatgcttgaagtttcattcagagtcttctgacttcatattctgattcgagccgtgtttttagacctgctgtggaagtgtcccccgagattcctttctgtttcacacctagaagcgtggcactgtttcttggaccatggctgcttctttctctcctacatctagatgattggtaaataaagatcctgaattcatccagaatccagcatggctggaaaagtgtttatttcaccttcatatttgattaacaggttggctggatattaaattttagatttaagatcttttcttcctccaataaatttagactataatcttttgaccaggcactacggctcatgcctgtaatcccagcgctttgggaggctgaggcaggaggattgcttgaggccaggagttccagactagcctgtgcaacatagcctgggtctctatgtattagttggttttcatgctgcagataaagacatacccaagactgggcaatttaccaaagaaagaggtttattggacttacggttccacgtggctgggaaggcctcacaatcatggtggaaggcgaggaggagcaagtcacatcttatgtggacaacagcaggaaaagagagggtttgtgcagagaaactcccagttttaaaaccatcagatctcgtgagacccatacactgtcacaagaagagcttgggaaagacccgccaggtccctcccacaacatgtggaaattataggaactacaagatgagatttgggtggggacacagagccaaacaatatcactctacaatttgaaaaaattaataaataaataaatactataattttctgtcctgtgttttgatgggaaatctgaaatcgatcataccctcatccttttttatggatcatctctctctctctatctctctctctcttttcctgtctttctctctctctggatgctgttataatggcaatgtacaatagaaacataacgtgagcaacataagtaatttaaacttttctagtagtcacattaaaaaagtaaaaagaaacaagtgaaattaattttatagtgtatttttatttaacccatttctgtatatccaaaatagtatttcaacttgtaatcactatttttaaagctattatttagatatttcacattacttttctcatcctaagactttgagatccgtgggtgttttactcttgcatcacatctcaatgtggaccagctgcattcaagcactcggtatccacacatgacacctggctactctgttggacaggcccagtccagaatcgtctctttatctctgtggtgcgttgcttcacctacagatatgggtctgttttcattttcttgctcagaaatcagtgcaccttttgaatttgtaatcttgtgtttttctttaattgttaagctcacactacttcaatttatgtgttcatttcctctttcctcctgttctttctctcatcacttgaatgctgaatctcctggaataatattttgtctcttaattttaacttcatgcttttcatcttttcaccattttgctctgtgctctaagagattttatcaaattcatcttcagtcattttattatattttttaattttggcaattatatctttaatttccaattattcttttttgtcttctggagattctttttcatagtagcctgctccttttttttccttctacttctggttccttcttaaacaaaaaattttttgagacaaggtctccctgtgtcacccaggctggagtgcagtggcgtgatcacagctcacggcagttttgaccacctaggctcaagtaatcttccaatttcagcctcccttgtagctgggactacaggaatgcccaagaaatttttttttttttagagatagggtctcactgtgttgcccaggcaggtctcaaactcctggattcaagtgattgtcctgcctcagtctcccaaagttctgggattacgtgtatgagtcactgcacctggccaaaaaaatatttttcaatttacacataataattgtatgtatttatggggtacatagtgatgttgcaatacagtgatcaaattagaataattagcatatccatcatctaaaacacttaacatctttgtgttgggaatattcaatatcatagtagcctgttcttgttttatggatgcaagatcctggatctctctgaggagtctagtaagatttttaaaattctctccattcctgaaatacattttttcattgggttttgttgttcatgttaatgttagtcttctcttgtgtgcaacttgcttccttcattgtctgttgtccttgggttggcaacattgtctactatgcgttcatctgcatgaatgaaacactaagttgactaatatgggaagccatggtgggcttcctccaagaaggtatacatttccacacatgacctcacctcttatctgaattgggatggttgtggtggctgacagtcaactcagctcttgagagctggtacctccttacacccttttccccaacccagggccacaaatttaaaaaggctttatagtaggtgtattagtcagttttcacactgctgtaaagaaatacccatgactgggtaatttataaaggaaaaaggtttaattgactcacagttccacatggctgaggaggcctcacgaaacttacaatcgtggtagaaggcaaagaggaagcaagcgccttcttcacaaggtggcaggagagatatcgtttgaaggaggaactgtcaaacacttataaaaacattagatctcataagaactcactcacttccatgagaacagcatggaggagactgcccccttgatccagtcacctcccaccacgtccccccatcgacacatggggattacagggattacaattcaagatgagatttggatggggacacagagccaaaccatatcagtagggcaccagcatccacacagggagctctagccttctctaggcagctcagttcattcttagatacagctccgttgtgatttattaattgaatctcttacagaaactagaatctctgggctgttgatgctgtccctactttcattcttagtgccattatggatttttcatttttagatgtctttactgtcctttcactgggattttgtgttcatctgccatcttgcactaacggatcaattacctttaagggaactattctgcctcccctaaagccattgttacctataagataatgaacaaggttttgacttttgaattttattttcatgctagaatttctattgctacttgtgtccaaagcacagtgttttacactgacaaatagtgatccatctcaacagaaatttaaacagagcccaggtacatgggtatgttccaattttcctctccagagttctttttttttttttttttttttttgagacgggggtctcactttgtcacccatgctggagtgcagtggtgtaacctcgactcactataacctccaccttccaggttcaagcaattctcctgcctcagcctcctgagtagctggaattacaggtgctcaccaccacacctgactaatttttgtatttttagtagagacggggtttcaccatgttggccaggctggtctcgaactcctgacctcaagtgattcacccacgttggcctcccaaaatgctgggattacaggcatgagccaccgtgcccagcccagagttcttaaattgaaacattttttaatgagatgtgtagagatatggccaactcttgtcttctcccttaataatcagtggtttcgtagaattgagaagtgagggttgttctgtaatgttccatctacaatagagtgggaaaacgctggtctaatggtgaagggaagtggattccagtatctgcatagtcactctcagttctggcgatggcccccaacgctgtgcctcagtcgcctcatctgtaaagagggcataaacactcttcttgcatgtctcatagggctgatacgaagaggaaaagagctgatgtgctgacacatactcagtactcactgagtattcgttcatcgattaaacgaagggttcaaggcaggggtctctcattaaggctgtggctgctctgtggctgaaggccatcagagatgatcaacctccttgccagcagccagcttggcatgcagagtggatcaagctctgccatctctcccagaggtctttccaggatgattttggtggtcactgcaaaagcaaagatatactaatcaccctgatctgaccactgtacattatatatatgacaccatcactatgtatcccataaatatgtataattattatgtgtcaattaaaactttttttagagcaaagatagccctcttcatggccttccccagcttgctggccaccggccttgagaagccaacggtttctcatacgatggaagagaaacaggaacagctgcctatgttaatacaccaggaaggccagggagccgatgggaggctggggattatgaagggcctaatctcatactcttcatgtagacacgggggaccaagtggctctgagagggaaaggatgtgctcagttagtgacagagccaagactagagtgttttgtacttgtgtgtaatcatcacagatgccatcacccaagaccacacctcaccctaaagctccattttgaagcacttcctggagtgggtatctcttcttaccattgcgaagctgggttttgggaaaccgccctaaacccacctcaagcccaagaaggctttgaccccaaatccatacaaacacctgctggaactcacagttggaagagatctcttggagagcatgttccacttgcccagtccccaggccactcttttttacagtgacctccaaagcctctggacccagctgccagctccactcctggctctgaggtcccccctggcaggagcacacatgccacagctttgcaccaaatccccaaagtgcccagcacattccaggctcccactgtctccaagggaccctagggccctggtagaggagggtaatggcaggaagccataatatattaaaacagcagattaaaacaaacaagagcattttggatcgtattacacatcactttcctcacatctgacaacagaaaaaaatcaaaggcggtaaaagacaatcgtagaccataatggtccaataacttggtgataaaagtgcttgtgggagcagcgtgggcgtcggcggctccgggtgcaggaatcaaagccctcttccagatccacagtggtgtattcagaggcattactgcttaagtgctcgtttaagacttcctccaaaatgcagcgcacttgctggagaatcataattaggccccaactgtgggccatattcacacattgtgcatcattcttaaagatgacagaaaaaaaattacccagggctatgtggcatggatagtagatcttttaccattgtcctccatgaaagaaaaaaaaaaaacacttaataatcccctgcctagactcatagctttttgaatactgagcaatatgacttagttttgttttcaaatggaaaaaggaaagctaagaaaacagaaggctgtgagcagtggaactctggggtttattttacagcctatagatgtggtcaaatccataggaaagtggagtgtaaaggatcttccatttatgaggcactgtccaaaccaaagtcagaccaaaattccagaaaaacctcagattgcgttaggcaagagtataccaccccagatctgattaaacatttggaacgtgtcaacttctgaaaaacactttcatttatttatttatttattcatttattttattttattttatttattttttcagacagggtctcactctgttgcccacctggagtgcagtggcagaatcttggctcactgcatcctctgcctcctgggctcaagcaatcctcccacctcagcctcccaagtagctgggactacaggcgcagaacatcacgcccggctaattgttttttgtattttttgtagagacagggtctcaccatgttgtccagactggtcttgaactcctggactcaagcaatctacccatttacttagcatcccaaagtgctggaattacagaagtgagccaccacacccggctgtcatttaatagtctgtatgctgaaaaaaaatgccacaaaaatgtgcagccatttttccatatctcctccccatttccttccctaccttctcaacccaagcccatttccatccctatgttttggctcatgggaaagagctttctaggaattgaaaaacaaatctgcccatgactcacattctccatgccagcctcagtgcctggctcactgctgcctttgcccccagggcaaaggtttcttgggagaacttcgttcaggtcaggtcaggtcagctccccaggaaaacagacctaaacctgaattgaggtcatcctcctcatttttaatctgaacttacctactgctgtcattttttcatctgcttttttcaactgatcccctaccccaaaagtggcatctacttattgttttttgttgttgtttggggtttttcttgtttgtttgttttcatttttgttttgagagggagtcttacggtgtcgcccaggctggagtatagtggtgtaatcttgactcactgcaacctccaccttccagattcaagcaatcttccaacctcagcctcctgagtagctgggactataggcgtgcaccatcacgcccggctgattttttgtgtttttggttgagacaggcttttgccatgttgcctaggctggtcttgaacttctgagctcaaactatccacccccatcagcctcccaaaatgctaggattacaggcatgagccaccatgcccaacctatttatctcattctattcacatagatttatacatgtgatttatagatttatctaaaaataaatagtatattttcatgacaacgctgggtggtcagtgacagattgttatttttcgctttacagattctaaaatctgcactttcataagagcctcatagctaatgaaggaggtatattacaagtcagtgagaaatgaatgaattctttgaatgtgatttggaagaaattggctctcttggtggtgtaaacatctaaatccttatctcacatcataaaataaaataaactgacatattaaaattataatacctgaaaaacatggaaaaccataagaaaatgtagataagtatttaatccttgcattgaaagaagtttctaagtataaaataatgaaggaagtcacaagggaaaggactaacagactacacaaatattgtaaacatctagatgtcaaaaaattaaaagcaaacaataaactgaaaaaatattagccacatacatgacaggcaaaaggttaatattcttactatacaaggcattcatacaaatcaataagaaaaagaaacagaaaaatgggtaaagattatgaatagataatttacaaaagagaaaatacaaatgtttggctaatacacataagaaagctattcagccacaaaaggaatccaaaaaattaaaaataaagtcaccagagatagcttcctgcttatcaaatcagaaaaaaatagaaatattaatagtactggatgctacaaaagtgaagtgagagaagaatataaattatatgacctttctggaaggcagtttgggcaatgtctatcaagaaccttgaaaacactcgtgttttctgacctggtaattcctttttaaggacttcatcctaaaaagtaattagaaatgtgggctaagctgtttgtaaaagataatccttagagagtgagttataccagcaaaataggtgaacaatgtccctcacccagagagtggcttaaattatagtgcatctatataatgaaatatcgcaaagacattaaaattgaaaaataattttagtggcaaggaaaaatacccatgcaatagtgttaaatgacaaatgctgcctgcaaaatagtctatagtatctcaaatatataaatacatgcttaggagaaagaactgtaaagtagtatcaacagtgtttaccagtgagttgaagaatagtacatactttaaaaaatgcttttctaattttttacaataacaggtatttattttataatcagaaaaatagaactgagaaaaccctctttttattttttaatactgatattccatttatgtttttaaattttttattttaaaatatttaactaacaaagattgaatatattcaaggtgtacaatgtgatgatttgatatacgtagacattgtataatgataaccacaatcgaattaattaatacatcaattaccatccatgctgtccattagattttcagcacttggtcatcttataactaaggttgaaccctttgaccctgtctccctgttttctccagcccccaccccctggcaactgctattctactctctgcctcaatgagttcaacttttttaggttccacaaatgcatgagatcatacagtatttgtccttccatatctggcttatttcacttagcacagtgacctccgggttcatccatgttgctgcaaacaagcttctctgttttcaatgaaaaagtttcaaaaaggtaaacatcataatggaactccacatctggtcacataaatccataaccacagttttttctgccctgtgaatttttcattttacagtaaggacaaaacatacaagtacgaagcccacaatactttaaaatcacttctgagttggtcaatatacataattgtaagtatatagttattagtaatcaatcctaattagtgtttctgtgttttgctttgtctatttaatatgatttaatatttaagtgctcatgtgtcagcatagtcaacatgtgtaacttgttgacagtgtggcaatcactgctatgtgttcaccaaacaattccccttccaccctgggcttatagcaagactacatttcccagcctcccttgtagttagatgtggccatgtgactgggttctgactcctagaatgtgggtagaagtaatgttgcctccagacctctggatctggctcatgaaacttcccttgcaatcctctgttctcactctcttccctcatggatctatcagatacagggaggaaatggtggagccactaaacacagaagcctaggtccctgagtgatggcatacagaaacctctctccccaacagacccacattgagttgcaatgtgtgtaagaaataaacttttattgtgctaagccaccaaggtttgtggttatttgttaaagtagttgtcctaccctaagcccaaagacttagctactatcccattgtcttgacagatcgtagtgcttaaccactttcccttcttggatattttcattgtttctaaatgatgccgtgattatctttgaaaaaaattatggtttttcatttgctccctttggcttatgcttatggagtatatttcccaaagtggcattaccaatgcattatctgaggataatgttcatagttcttgttacactactaccagactgctttcaagaaatatcggagcaaatgagtgcagcatccccaatacatggtgtttcccacatctccagcaacactgggttttattatttttagctttgtttgccaatgctgtggcaccaactagaaagtgcttccaaggtcatttacacttgcaatacttagtgagagttcttatactatagagtatgtggcagataacattttgatctacgaacctcaccctacttactcaccctttggtctgccctctgatataggcagccgcagggacgttcacacgcctcgcattagtgaagtgatgacactgcaaaatacagtaaaaggaatcaagctttcacttctgcattacaaaataggcttctggaaactcacagcagagaccatagttttaaggggggaagaagctttctgtatttcaaagcttggcttttgagcataagaagcctcaggcctgaaagactcaaggcatatggttcaggcataaataatagatttggaagaatatgtgatcagtcagagccagacagccctgccccaggctggataaggtttccctggactgaggcagtggagaggtagagaaggaagaagaggcttaaatggtgggtcctgaaggcagaaggctgcgacaggagcagcaagaggcagatggacgctgcatcccctacactgctcatgtccacgtggtacagtggagaaggctgtatgcaaatgccactcattcaggaggggttcctgcacagatgctgtcttgagcactgtggatatggcagtgaatgaaaaagaccaagtccttgcttctgcagaatgatgttctaatgggggaaatagacgtcaacaaacaaataaacaaatacgcaggcagacttcgctacagtgcgcctcacagacattgtgtattttacaaattgaaggtttgtggcaaccctgcatggatcacgtctgtctgggacatctttctgacagcatgtgctcacttcatgattctgtgtcaccttttggtaattctcgtaatactttgagctttttcattattattattgtgtctgttacagtgatctgtgatcagtgatctttgctgttactattataattgtttttgggtaccaccaacagcacccatacaagatggcaaacttaacagatgaatgttatgtgttctgactgtttggactccctatgccctgagacacacaaatattgaaattaggccaatgaatagccctacaatgggctctaagtgttcaagtgaaagtaaaagtcacacaactctcactttaaatcaaaagctgtaagtaattaaacagtgaggaagacacagtgaaagccaagacaggctgaaagcaaagcttcttgtgccagttagtcaagttgaaaatgcgaagaaaaagttcttgaagaaaattaaatgtgccactccagtgaacacacagatgataagaaagcgaaacagccttattactgatgtagagaaagttgtagttggtctggatagaagatccaaccagccacagcattcccttaaaccaaagcctaatccagaacaaggccctaagtctcttcaattctataaacactgagaggagaggacaggagaggagaggagaggagtggaggaggaggaggaggaggagaagaagaagaaggagaaggaggaagaggagaggaagaggagaggaagaggaaggaggaggaggagtaaagaaagaagaaagaagaaggaagaagaaaagaggaagagaagaggagttggaagctagcaaagtttggttcaggaggtttaaggaaaggagccatttccacaaacatcagcacttgaggtaaagcagcaagtgctgatggagaagctgcggcaagttatccagaagatctaaataagattattgatgaaggcagccacactaacagattttcaatgtagatgaaacatccttatgttggaagaagatgccatctaggactttcatagctagagaggataagtcaatgcctggcttcaaggcttcaaaggacagactgactctcgttagggtctaatgcagttggtgactttaagttgaagccaatgctcattttccattctgaaaatcctaggccccttaagaatgatgctaaatctactctccctgtgctctgtaaatgaagcaacaaagcctggctaatagcacatctgcttatagatggtttactgaacattttaatcccactgttgagacctactgctcagaaacaaacaaacaaacaaaaactctttcaaaatattactgctcattgaccatgcatctaagcacccaagagctctgatggagatatacaagaagattaatgtcattttcatgcctgctaacacaaaatctattctggggctcatggatcaaggagtaattttgaccttcaagttgtattatttaagaaatacattttataaggctatataggtgccatagtgattcctctgatggatctgggcaatgtgtgcaactcactttatcataatgtttgctttattgtggaggtctagaactaaacccacaatatctctgagacatgcatatatatatatacacacacgcatatatatatacacacatatatatacacacatatatatatgtgtgtgtgtgtgtgtgcctgtgtgtgatatatatatgtgtgtgtgtatggtgtatgcatatatgtatatgatgtcagtggtgataagtgctctgaagacaaataaaacaggacagagagtggtggatggtggaattattttaaataaggtggtcagagaaggcctttctaaaaacatgatatgtgagcagttgaagtgggaagggagccctgagcatatttgggcatagagcattccaagaagtaagaacagcgagtgcaaaggccgagacagaagtgtgtcttggcatctgccagacctataagaagaccagtgtggctggagcatgtgagacagagggaagaagacggtggaagggagaaagtcagagagacagcagatagacagtggatgggctgtctggacagacaggatggaggcagtcttggttaacacagggcctctctcctcctttcccagcatggtgtctaagtcccagaaggcactgaggggtcaaggcaattagagtagtgtgcccagggggacagtgtttggatgtggttgatggtcctcaaggcctccaccgcatcctcctggctccgcaccactagcctctatgttcactttccactccctacctctgggccttttctaagccacaagcagacagttggctttccccgtacctttgcttgcagggtgccgagcaaagttcggaggagaagttggttcctggatcctggcatccctttttcccctgctttgcatctgtgatggttaatattgtcaacttgattggattgagagatgcaaagtactgttcctgggtatgtctgtgagggtgttgccaaaggagattaacatctgagtcagtgggatgggaaaggcaaacccaccctcagtctgggtgggcaccatctaatcagctgccagcaaggctagaataaaacaggcaggagaagatggaagagcagatttgctgagtcttccagccttcatctttctcctgtgccggatgcttcttgcccccaaacatcagactccaagttcttcagcttttggattatgggacttacaccagtggtttgccaggggctctcgggcctttggccacagactgaaggctgcaccatcagcctgactgaaggctgcaccatcagcttccctacctttgaggttttgggactcagactgatccactgctggcttccttgctcctcaccttgcagacagcctttcataggactttaccatgtgatctcatgagttgattctccttaataaactccctttcagatatatgcatatatcctattagttctgtccctcaaaagaaccctgagtaatgcagcatccttgctcctacttaaggccacactactgctggcttggcccaccatcatgtatatgcaccagtttcaaaatccccacgccttccttgagctcaggaattcaggctgaagtcaactgattatgtgaagaagtaacatgtacattgaaatatgagttaaggccaggcatggtggctaatgcttgtaatcccaacactttaggagttcgaggcaggaggatcacttgaaaccaggagtatgagactagcctgggcaatatagcaggaccccttctcaaaaaaaaaaaaaaattgccaggtgtggtagcacatacctgtggtctcaacttctggggaggctgaggtgggagaatcactcgagtccagaaggttgaagctgcagtgagccatgattgtaccactgcactccagcctgggcaacagagtaagatcctgactctaaaaaaaataaaagaaagaaaagcaaggaatgaaagaaaacaaaagaaaagaaaagaaccctccatggaagttagttgctaagcaagataaatctctaggtgaacatggaagaggagtttttccttttagcagcttcttacctatttctccactctggcaggtgagcgcgcgcgcgcacacacacacacacacactcgcatgcacaccaacacacccctgcatgctccagaagcgcaaggatcaggaatctggtcccagctattgacagatggccactcctgttctaaatgaactgccggcctcggcctccctttcatctcaaaggccatttgccataacctcattcatctgtgcagactgtcaaattctctctcccagacttctcctgtgaccttcattttattctctgctcatgcctgagtgtggcagctgaactggattgattaaagttttagcactgtcttgttttaattcaagagctaaactgagcatttaaatgaactcgcagcaggactgattggcaggcttctggaatctgattaacattcctcctgaggcactcttaccctccttatctctgctctgtgtccgggttggtttctgggtgaaattcactgttggtttaaaatgacatcattggagcaagtgagagtagacgaatgttcacttccatccatccatccatcactggagaccctgggttcattaagcgtgtgccaggcacagtttccctctacatcccataattcatccatgggtctaatgaaccaagatggagtttgtcagtttgccccagtttgactagatgggacaattctttggtgctcagaatcttttatcctatagagagagactgtgaggggaagagagagcaactctcagcacagtgacataaatgtcagtgcacatccattcatcatttctacctacaaacacagtgcccacaagagccgggacactgaacccacaccctttcttctgcaggtcttggtctgattgctatttttcagggaatcacctggcctctccattcagttatcccactgtaattgcctgtggttgctaagacagaggaggaagcatgggaggacaggcctaggcatctatcacccagggctggatcaggcatataacttcataccatgccccctctaaactctcaagggccttctcatccatccatccatccatccatccatccatccactcacccatctgtccatctgtctgtccatccatccatccatctatccattcatatatttaattcagcaagtatttatcacttgccttctatgtaacaggtactgtgccagatgctgggattttttaaaaacatacccaggaggttgttcttattcagggatggtgtgttaggctgttcttgtattactataaaaaaaatacctgtgctgggtaaattataaagaaaagaggtttcattggctcacggttctgcagacagtacagaaatcatggcgcatactgcctgcttctggtgatggcctcaggaagcttctactcatggcagaaggtgaagagagagcaggcatctcacagggtgagaacacgagcaagagagcgagtggggaggtaccacactattttaaacaaccagatctcacatgaattcagagccagaactcactggtcaccaaggggatggcactaagctgttcatgaaggacccgccctcatgaccaaacacctccaccaggccccacctccaaccctggggattacatttcagcaggagatttgaaggggacaaatattcaaacaatatcatacggtaaggccagcagattaggagatgaccacaactgaaaagatagtttgttacttacggttcccaagagaaggggacacaccatgccacaccattcagagccacacagggaggcaccaggtcgagtcaggaggcaggagtgagggaaaagcatgggcaaagtctttccttcatttgtggttctcaagggaaggaacgggcgaggcagggtaagccactgagcaagtttaggattggataggctgaataacgtcagcaggctctgggctatcagggtggtccccagttgaatggtatctggccctagggtgattttgggcagaaggataacgtctagggtttcctaagcctgatgaaaggagccagtttggggaatggacttgggatgagttggtttgcatatcaaaggcatcttgcaggcaagttgtttgctacctgtaggaaatagccaaccctgggaagggtagtcccttcctgggtccacagggccccaagatgtcaaagcatcctaaaatacagaaaacgaaaacgtggttaatacatggggtttcagaaaatgatgtctgcccttaaagacttcacagacttcaaaacaaacaagagtttcatagcatatggcacaagctgtgccagtcacctttggggatgtctgcccagccacaaccttcccattcgtgggaaatacaccccagatctaaaggggtgggctcctcagtggccggccagctttatagtccatggcccatgcccctggcagtggctaattggaccaagatggacacatggtcccaagctcagccaatcagatttcctctcccactaatttgggattgcaattcagagaccggtacacctgtgctggcgggaacagcagctggtaaacacaggagccaggagacagtctgacttcaccgtatgtatatctgtgatctccaaccctgggtgcacagtggagtcactgagagtttttaagaaatactgaggccagagtcccaattcagaccacttcaatcagaatctctgaggatggggcccaggtgtccgagctcctgtcccaagcctgactcactcctcacacccacaaaagtgaactgtcctgggcctgcgtcccccctccaggagcatcacctctggccctgtcccttcatgctgtgtagaagtgacaggactgtgctatgattgttgtggatattccacacacacatagagtcatggagcacagcaacagggagggggcatgcttaaattaacacataacattcgtgcatttgcagggggtgcatatgatcttttgttgcatgtgcagaatgtgtaatgatcaagtcgggatatttagaatctccatcaccttgagcacttatcatttctacgtattgggaacatttcaagtctgctcctttagctattttgaaatatacaattcattgttattaattacaatcaccctactctgctattgcacattagaaattattccttctgtctaactgcacatttgtacccattaaccactctcttcatcccctcctcccccacatacacacaaacacttcccagcctctgataactataattctacttcctaccagagggagcatttttttacccagactggagtgcagtggcactttcttagctcattgcagcctccaactcctggggctaagcaatgctccagcctcagcctcctgagtagctaggactacaggctcaagccaccatatccagctaactttttttaaaaatgtttttgtagagacatggtctcaatatgttgcccaggctggtctcaaactcctggcctgaaagccatcttctgtatttgtccattttcacactgctgataaagacatccccaagactgggaaggaaaagaggtttaattggccttacagtttcacatggctggggaggcctcagaatcatggcaggaggcaaaaggtaattcttacatggcaatggcaagagaaaacgaggaggaagcaaaagtggaaacccctgataaacccatcagatctcatgagacgtattcactatcatgagaatagcataggaaagaccagccccatgattcagttacctccccctgggtccctcccacaacatgtgggaattctgggagatacaattcaagttgagatttggtggggacacagccaaaccatatcagcctcccaaagtgctgggattacaagtgtgagccactgtgcctggtccagggggagcgtgttaaatcagtctcccactcaacttctgataaaatgaatgtccatcaaaagaagatgtgcagtgcacccaagaagtcaatacatcaattaaccaagaaatatttttaggaagagagatgaataagaggaaagacaaggttcctggcctgggggagcgtttagttcagctggagagggctttagatgttgatgtagatatgtacacatataaatatgaatgcacgtggcagtctacttgattaacattagtaaaccaagcatgatacacactggaagaacggcactccatgcgatcagaaaggaaagattcctctgggctgggctagtccaggaagacttcctgaaggtgggggcatttaacctggtcttgtgaagaaaggtgagtttcaaacaggcctatgggccagggtaaccagctctgtaggtgcttgaaggacagccatcctctgcacttggtgtgcagaacaggccccatcagaaggcgttctcagccacagcctcaggctgtgtcctcctccttccccacagagttaattttttatcactcaagcaaaccagagaaactcaaaagcttgaactaataatggtggcccaagtccaagcatgggtacggacccaggtgaggtcctctaacctctcagaaagcaggtatcaggagacaaagggggtgattgggtaactaggggagacaggagacctggactcacccctgcacagatgctacctttcaaagacacaggtgcatcaaacactggaacccagatccactcacagtcaaactctgccccttctttaaaatagctgctctagggagacagagatggagaagagctttgcactcactgctcactcttcccaggagctaagcctaaatactgagggcctggactaagaataaaacttagtcatggctggacgtggtgactcacacctgtaatcgtagcactttgggagaccaaagtgaggggaccgcttgaggccaggagttcgagaccagcctgggcagtatagcgaaacgctgtctctacaaaaaataaaaattcaaaaattagccaggtgtggtagtgcactactggagtctcagatatttgggaggctgaggtgggaggattgcttgagcccaggaggtcaaggttgcagcgagtcatggtagctctgctgtactccagcctgggcaacagagtgagaccctgtctcttaaaaataaaataaaataaaacccagtcattccaaagcaaatgtctttcctctatttccatattcacaaatccctccccagctctagaggaactagccaccccgtgagccgtcttccctctgagtctcttcttctttccctcggctgatcccttcatcctcccattctgcctctctccatctccctatcaggaccccttattcctcagctgcaatcaactcccaagtattcggcctgcaattcctgaacttccacctggcactgctaagctttcaaacccacaacctcgggtctgagtttcaggccaggagtgtccctttctcctgccctttgggggagctcggatttctacccatccacttttaaaacatcccttccctctactcagtttgagaataacatctggggacagatgtgtctgaatcatcccgacttggggcttggtttccccctctgtgcaatagagagtggactgtgccctctctctaaggatgaccgtccgcacacaccccatcctgagtatgagctttttccaggacggcagtttattttcagctgtaggctttcagcgacactggctttgcttctttctgctgccgtgaaagattttccatgccactagggagtataaatgctcctcacatgcatttttgaaagacctcggaaacctctgcataaatcagtagaagttcatttatggtttcagaatattctggctaatttatctggtgtcaaagatcctgagcctgagccttcagtttccaaactgggccctgtagggctctgctgcatttcccttgcatgtttgttttggctggccctgaaattcgacccggccacaaggagacctttatcattatccaaagagatcttccccttcccaatgacacactgttcggaggtttaactccgagccagtgcttcttccccttttaaaaaaccaacagcaaagatagagctcttccttccaagccaccaggtcgcaggtctcagatttcagccttgccctgatgtccttcctgtgagtttgaactccgctgtgccagcatgtaggccctcccaacaccctcctgctggccttacgcgggccagggcaggcagtgtacagaaacagggacccactgatggtgatgcaatgaaaaaaaataacctggcagtcagcatgtttgagctttctggggctgtcttaccagaaatcgctgtagaaacatgtggctgacattgttagcaattagcccagtgtccagccccagaggcgattttacatccttcctggctatggtttgagatttcattgtttgatgctccctgcattttgctctctcagtatttcctctaccctgaatcatgtggccaagccttaaactcctgtcctttgaggacaatcagaatgacacctttagtgtttgtgccttattttatggcctcatgatcttgtgccctttggagttcaaaggtcacatcaggcagcaggccgggaggtttttgatgtgacctttgaaccccagaaaacaaaagaatggaggcccacagagaccatccatctaaaaaatgatcctataaagaatgcaactcaatcagcccagagcatgcaaatcacataacatttttatggagcaccctgctaaatccaaacttacagccagaagaagggacacaaaccccatgatcccaatacataaatcaaagcttgagaaaagcaaagacatgagtttacagctggctaagaatggaaggatttgcaaaatgtgatttatacatttgtttcctcccctcctcccacccagtctacacacaaacacacactcacacacacgctggtcaataccacagcaccacagggaaatccagcattttcctttccaaaggtttgccctgtgctaagtctaccatggacagacatgggagagcaactgaaggccaagagcttcctccctggccaccagaaccatcctcagagacaggcagaaagtccatagggcaggcagccagataaggaagatgaggacttgccatacaggtaaaaggctggccccacaaagaaggccacattctgtagaacagatgtcacctcccctatgacacagattgtccctcaacagtccttaatacctggcacacatgtccccagggcaaaggtcagactaatttctgaattgatgagaaatactgttcaaatagttagagactgagcaggaggtgctcctgtttctcatgactattgaagttttggttttttaaaaaagaaatatttaagtgtgtttctagatgtctagataacatgctgatgctgggtaatagatcttgagaagtctgccaagtatgtctgtagtagcaaatgttcagagaccagaaccgtggagtatgaaaaagagatccccttttaaatgaagattggatttgcaattaaaatgcgtgtcttctttcttttcttttccatttttttttttgtttgttttttgtttgtttgtttgttttttaagacgagatctcactgtgtcacttaggctggagtatagtggcacaatcacggctcactgcagccccgacctcctgggctcatgtagtcctcctgcctcagcctcccaagtagctgggaccacaggtgcatgccaccacatccagctattctttttaatttttttgtagcaatgaggtcttactttgttgcccaggctagtcccgaactcctggcctgaagtgaccctcttgcctcagcctcccaaagtgctgggattacaggtgtgagccactgtgcccggcctttgtgtcttctacagtgaaactgaaaaattgtgtaggtgcatctagatcttcatcatggatgttgcatctggaagaatctctgctctatctcatccaggttcctcctttctttttaactttgcaccagattctaatgtctctgggagctatgaatatatttttaactctgtctgaacagtaccacagctgtgtctaataaaactatgccttcaacagtggcaccccaaagcaatttcagatgaaataagaatcctagaaaggaccctagaaagaaaaaatcctggccttagaattggaagactaactctgtatgaccatggtcaagtcgcttcacctctttgagcccccatttctgaaagttgaatggtcctggtgctttctgagggcctgctctgcacaggtcctgcccaggtgtcgggataacctctatcctgtcagatttaacactgcatgacttctctgtttccaggacgtcttacttagacacaaaagaatgaactaaacagctcctcctctacccccgttctttaactcggggatttcaccacctgtttcctacttaggagaggcaaaatgtaacccagtggacgaagccccattttccaaatgattcctaagcagcaaacatgatgttgaagtgttctgcaaaattctccatgcaattttggaagcccagtctaaggaatatatatgactgctgcttaagctgctcaaaaataagtttaaccagggtctcagagtctttctggcccaagactattgtggctggaaagactaggaaatcatcctggctaatctcgacctctttacacattccacacgtgctctggacaggggctaggggacactcaccagaggtcacagggctaattaggcacagtcaggaccaaagctcaagctcctccagcgccggcgcacactaacagctaccccagtgcacactgggccgtggcactggcttcttacccatctctacaacaaaactgtgggtagatgttactattgcatgtcagagatgaggtgctagagtcctgggaggttcagttacttgcttaaatctcacagctgatacatgaggagccgggattgggctcaggctttgtctgattccgggcctgtacttgtaagcacccacctcagccctgagaccccatctctatgccacagcgtgaagcctcacacacaggagatgatgagtccacagaacctgagtgggaacagtctcagaggaagggaagaagggggcatgcagtgagtttaatggtgcccccctaagagatcctaacacatcctaacccccacaacctctgaatgggacctgttttggagaaggcaactttgcagatgtaattagtttaagtatatcttgaagagatcatcgggattatccaggtgagtcctaacccaaatgacaagcatccttacaaaaaacagaggaggagccgggcacagtggttcacacctgtaatcccagctacttgagaggccaaggtgggaagatcgcttgagcccaggagtgcaaggctgcagtcagctatgataaaaatttaaaaataaaataaaaataaaatcagaagagaagacacagacacaggagagaaggccatgtgaagatggaggcagagatggagccatgcagccacaagccaaagtatgcctggagccacaagaagctggaagacccaaggaagattctttcctggccctgctgatgccttgactttaggctttctgggctccagcattgtgagagaataaatatctcttgttcaagctttgtaggcccgcatagcatgagagtcgttgggtacttaggcttctgaggccaaggcattaggttctgcagaactgaaatctccacactttggtaagaatgggcgctgaatagccccctggcaagtcagccccagccccagctgtgctctttaccattacagagctcctaagaacagaaggccttttgcccattggaacccagttccttactcttagtaagatttggcaattgagccaagacatattctagcctgagtcaaatatctagattgataaattgtccaagtcaggtgtgtgttggggaaagattcttcaatgaaggtttcttgtagatcctaaccctcccaaatacatgttcaatgcaattagatttttaaaacttccatgatatggttaggctttggtcccctcccaaatctcatcttgaattgtaatccccataatccccacagtccccatgtgtcaagggacagaccaggtgaaggtaattgaatcatgggggcagtttcccccatgctgttctcatgatagtgaatgagctgtcattcactatcacgtgaatggctggagatgacctgcttgggagctcaggccacctcaggccacacctggctacactccaggctgaagaaactgataagttccaagcaaaccgaggaaactccccaagcacaagagtcaggagctcttcccccttcacttggcacttctccttcctgccatcttgtgaagaaggtgccttccttccacttcaccttatggcatgattgtaagtttcctgaggtctccccagccatgtcgaactgtgagtcaattaaacctctttcctttataaattacccagtctcaagcagttctttatagcagtatgaaaagagactaatgcattccatttcaatggacattttcagaaacacacttctatgtaaagcaagttccgtagtgcagacttcctgcttgttcccaatgggtccttgggttataagactacaaagacagaggtggctgggcttctttattgaaacttgctggctctgagacagaacattccagcaggcagacaggagatgaggatgcttcatcacttcagcactgatggactgaatgcttcttctctggatcactgtatcctagaagcccagtctgaggatgtgaatagcaacatctacccacagctttattgtaaagatgaatagagttgatgtgtaaaaagccagttctctggactggcgtgcacacacatggaagtagccattattacaggctgggaatggaggaacatgtgcttcagtcttgactgttcctaattagccgtgtgtacctacttttctcatctataaactagaacgagcatctgccctaactaaggggcagattttgagggaatggcacagactacttctcaggctgtaaaatggggacatgaatgtttttaattgtcatccttgacacatgattccagtgttttcaaatattttcctggtaaaacagaggtcagatcctcctttgctcatgctgctgtcagaagcccagacagcactgttctggtggccagagatgacctgcttgggagctcaggccacctcaggccacacctggctacactccaggctgaagaaactggtaagttccaaacacaccgaggaacctgcccaagcacgagagtcaggagctctgcgttacatatgtcatattttttctatctagcccatatttaataaacccaattttttaaaaaagtaattgagtctcaatcctcagaagcaaatcttggaaatatggaaatatttgaagacgcctccaaagtagataaaagaaaaatggagggtttcaaaaatagcagcttatgcaagatttttgataaaatgaaatccccataatataaaattccccataatataaaattccagaatacatagtaagacctctgacaaggaatagagtcagacactgcttccacctatgaatcatgccaagaaataactacctctcattgggtgttgaaaaatccttgtaaatatatagtttggaagaaatataaaagccgtactttcctctgatttcagaataaagactcttcctccatcctctgactcccacaaacttcgggtgcacacacatgcacgtgtgcttacacacgcacacacaaacatacacacacacacacacacaaaatgaaccaagaaaggaaggaaaagagatcaggaatgagagagcccactaatggattggcttaagtatagaacaacatcccatcactgttctagaaaataatcaatcgagcacttaattttaaacataaaagtaagctgccaggagactgttaatagataaccaaatgaattaacagttgtaggtgggatttgaaaccaggtcagattttccaccaagctccaggccctatgcatacaaagggcctcaccagctcgggcacttgatctcacactgtttcaaagtgggatatctccttttagccaatatccctcctcagcgggcttgtcacttcaggggattgttctttgtgcatcttccataaattttataacaccactactttaaaatattgatgggcaacttggccttggcccaggcccacagtgggttagcatggacatgaaaaccttcaggagggcagaaacaggaagaacacattccccgctgccttttcgtaagggacaattgtgtaagtgcggtggttacctgagctggagacctgcccagctttgatggatggctctgccctctgggaggctgctgagagctgtttggggacaggagggcactcaggacacacacaggcaatactgaggtacctatagacctgcaaagggtaagtaaaatccacacataatcccccaagttgttctaacctgaaactcaactttcttaacactcagactttttgcaaagttattgataaataagaaaaaatggctttgtcatgtgtctcttcttcctatgcccatcaatcccattcttcctataaccctatcaaggcaagtgaccaaaaagtaaatggtagcaaggaacagaaagagcaggacaggccgggtgtggtggcttacacttgtaatccaagcactttgggaagctgaggtgggaggatctcctgagcccaggagtttgagtccagtctgggcaacatagggagacatcatctctacagactcacacacacagaattagctggccatggtggtgcatctgtagtcccagtgatgtggtttggatttatgtccctacccaaatctcgtgtagaattggaggaggggcatggtggaaggtaattggataatgggggcagatttaaccttggtgatctcgtgatagtgagtcctcataagatctgatggtttaaaagtatatggcacttctctctcattctctctctcctgccaccatgtgaagaaggtctttgcttctccttcgccttctgctgtgattctaagtttcctgaggccttccagtcatgcttcctgttaagcccgcagaaactgcaagtcaattagacttcttttgactttgactacccagtctcaagtagttctttatagcagtgtgaaaaccaacttatacacctagctacttgggaagctgaggcaggaggatcacttaagcccaggaggtcaaggttgcagagagccaggattgtgtcactgcattccagcctgagtgacagagcaagaccttgtctcaaaaaacaaaaacaaaacaggacaagagaactgatcccctagattcctgccatcacactctcttcataatactcccagaaaaaaactataacaccactaagaacaatacagcaatagtgtgctaaccaaattaatacaagttaataatgactaccatttattgggccttcaacacacatacacacactcatgcacacacatatatctcagacactgcactgtactaaacacattacatatgtgatctcatttcatcctttaaaaaaaaatctgcaagaatagcctttgactcagacaacacacttccaagaacttttcctatggaaatgatcaaggatatgtccaaagattttgtctataaggatatttgtcaaaatcattgtttagtaatatgtcatgacaaataagacatgtccatgagatgttaaatgagcaatacagagtatagaagaaacatatgagtatttttataattttaaagtatgcataaaatatgtggggttagtttcatcaaagtgtcataagttcatgcgtaatttccccttttttatgtatcttactttccacattttaaaataaattttagtaagaaaaatatattttaaaattatgacctaggtgctatgtccaaatattcataggtgttaatgaataatagcccactacagatacaaagccctttctagtctacattctggttttacatgttgtctcagatgattctcacaccatcttttcaggtgggcagagcagatggcttataatgctaaagatttttaagcatacaaaaaataattaaaaggctgggtgcagtgtctcatgcctgtaatcccagcactttgggagacagagacaggaggatcacttgaggccaggagttcgagaccagcctgggtaacatagcgagaccccatctctacaaaaagaaaatttaaaaattagcctggtgtggtggcatgcacctgtagtcccagcaactcaggaaactgaagcaggaggagcccaagagttctaggctgcagtgagttaagttatgatggcaccactgcacaccagcctgggcaacaaaaggagaccccatctgttaaaaaaaaaaaaaaaaagagagagagtaacacatcaaaccaacagcctttccctgtgacccacaggcaggcacactcaggcctctctgaaaagaggctgcccttggctgtggtccacggggtgtctgctccaggctcccaatgttcattgtgggggtgctccaactgccgtgaaaataatctgacttatcactccttgggctccccatactcccattacttcttaggttctgtaggattctgctctgttcactgcaggaagggagcaaggtgggggaacattccagaatacatagtaagacctctgacaagggatagagtcagcaatgtgcaggagctggctcatgctggctcaggaaagccaatctttaacaactcctcccaactctatgatcagtaatgccacgttggtagcttggagccagcagcagtggtagtatttacaccatgaaaatcagcaaatgctacaaatcagggttcctttttctcccagagagcccgttgttaaacgtttatcagcacaccactggatgcagtctcagaaagaaaaattcgtatattcaaatgaaggttaatccctccagacccctgctttaattaagcaggactacagctccacagactaagcagactgtgaaggttgttttaaaataacatattattcagaaaactgtttatgtatttacaaaccttgccaatttgcccactctccatccctccttgaggtctcttgtttccttttgctgtgtttcccccagagtcaaagaaagcccacctaatacagttcttttgtttataaacttgatggacccaaacaatgtttgaaacagcccagctctgagcagggacagaagaatgtcctgctcaccacggcagtgcccagtcttgccccgaagtcagacttcgctgagccgaaagccttgataacgtgtttgcccctgtcctccggcttcccagtcgttgggccgtcttcactggtgcttcctgaacaatctctacgctgcacttgaggacgactcagctgggagtgaaacatgatcaggagataatttggcccagatggctctaatgcaggcaggagcatttggctgtgcatatccttagtctaggggaacccatttaaatttttttgagaagggaatgtaaccaagcagccacacagcctcaaaatgctacctcatgttatacagctgcaatgagatgtctgatcacgctcctggagagacattcggctcttaggaaggtaaagccaggctagcctttgctgctggataccaccacggctcggctcggtacttggcctttgggggattcagaagggatcaggcataaaaccttgaatatattcctagctcctgaggatcaagggattgcagcaaagggtaataccgcaactggaaacaggagaaagcatcgcagaaacacagagtgaaccaggagttcggaagaggcccagggagaggcttgcgggacacaaaacggtgaagtggctgcacagagcagctgtctttatttctgtcgagctctgaggcataggaaggggttagaattcactatttgacacagttttccttttctgtcatgcaattgacaggagaaagatacaaataaaagaagctgcttgtctgcagagtgtagcttcgggaaaagattagtttgcttcaggaaaaataggacccatgcaacccgaggctctagagtatgacggggacacattggtgacagagtctcaccagtgttagtgaaaaggtcggctgccttcaggagccagctggagctctacagctgtgcacacagggttccatctcattctctccagcgtagtcatggacactttaacgtggagccctcccagaggaacagacgggaagagaccactttgttccccactgcctaatcttgagaatgagcaattcatgctcccctaaagtgggtccttacccactgctgcgttggtcttcccctgtgacaagttttcagggccggatgaggtgacaagtaaaacaaaatgtacttttcagacagacctttgtcatcggaaagcttttgtcccttttagccctctggctgaaactgttgattgggaatcactttccatggattctgttagtactacaggcccatgggtttttggtggagacaaatggaatcttactaaaaagacttatacccctagtcactgtgggggtaacttttgctccaaataggcagtgattatagagagagctgcctctctatgtcgtgaatgtggagaataatacaagtatgcaatccatagatatcatttccaccatcccagaaaagttcccttttaggcagcagtgtgctggtaaatggtgactaaccagcaatctgaaaaacagtctatgcatataatgtaggtgtgagagtatgtttactataaattttactaatctaaaagatgtggaatacacaatttacaaataataataaaatacacaatacactttcctacaaattccatatagtcaattcattctcagagaatgcttttgttgatgtttaccaagctctcgcatctgcagccaacctatggttgcaattgatcaacaagtatagttcacacatatcgacattttgtttacattcatgagcaatgcaaatatgaaacaacttctttgtatgccaatacttcacttggataagttgaataatagttttcaaataatggaagactattcaagtgttcaagtgtttgtgaaaatcacagtgtaatggctacagaaacaacttatgtactgtgttattaacgtttttcccatcactttcttaagtctaaataatcaacgacaaaaaaaagggcgaaataattagaaagtaatgaatttagaatgttacctttgtttttaatataacttaatttgaaagatattattttaatgattaacttgaaattttaacaattggttcacaagccaacatgccatgtgcctgtgcaatcaattccatgccatatatacactttttttcagataaggaaaaggtaaaaatacagaatactacatggattatcaaggttaaatctattctttcttaacatgacaggaaagtaaagctttgacccgcaggggagactggagaggggaagttggcctgtctgttcccatttcaggagcaggctaagagtgtgtttctggaaacaaaactgtcagagtgaaggctcacaagaaatcagaaacaggacccagatctctacccaagggcttataacaaaggctcaaagcaggcttttttccaaaaatgtttttaattccaacatccatcttaatggcctactgtagcctaatttagccaatagctgttattctaaaaatggaagctaatgattccagctaaaaacaacgaagccggtactatcacagtatgttgtaagaaactgattatcatggggtgcatttttcacttccttttctctgaagaaaggcttagtaagagtcccacatcaaaagcaaaagcatttctttctctcacgggaccccagaataggaggaatgtgttctctagaggcaaccacctcccagaactactctttggcaagatgcatcagacgcacggagcgatggtctggctgaagggcaccacctgctattgctcatcatattcgtgccattcaacaaatattagcagcatcaatttacttctctgaagcacctgcaggtacccaccacttggctgagtgctatatagctctacacactttatattttgcaaaatacgtgcatatggaaaagaagcacaacatttaaggcaaagatcagataatagccgtattgcacaagtgtctagctggagaaaattgacaaaaaaaatagaaagtttgtaaaatgatcaaaattttagatatgcaggataaatatgttctggggatctaacatacagcatggcgaatgtagttaataatacttcaagtactgtagacagttgtccttctatattggcagggaattggttccaggatcccccacagatactaaaagttatccacactcaggtctccattttgctattaaaaattgagaagctgaataatcttaatttagggcattagtttccgggtgagctcagaattttcttattccagcttgtgacatctcaatgaatttcccatttccacctaacgttaggagccctgttcctgggccaccttcaggattctggcagaaggggtttcaggtgaggtgagaaggttaagaggtgaattggaggttcttggctgatgcacctgtgccttcacgtgcccccgtgcgcacacatagacgttcgcttacagctgccagctttaaattctgccttcccgctgtcgttgggcaaggtggtcctttgccgcatcgacaggagctcatacggcagagcccctaggaatgcaggtgcccccagtcatctacactctgagcagggggcaggtcttgctgctcactccacttggggtatggctgcagcctaatctctcaccctttgtgggtaataataatatactttggataagcacaatggcatcacattgagcaaaggatctcttttacatgccttaagttatggtttcttgaattaaatatggaatttactagaaagattagcccacctcttgcatcagcgtgacctggaggtgagacatggagtcaaaggagattattccggaactttaagatttattgagtaggccggggatggtggctcacgcctgtaatcccaacactttcagaggctgaggcgggtggatcacgaggtcaggaattagagaccagcctgaccaacatggtcaggccccatctctactaaaaatacaaaaattagccgggcatggtggcacacgcctgagtagcccagctactccggaggctgaggcaggatgatcctttgaacccaagaggcggaggttgcagtgagccgagatcgtgccactgtactccagcttgggcaacagagcgagactccatctcaaaaaaaaaaaaaaaaaatttaaggagtgccctgccgggtttcagacttgcacagtggagtgcagtggtgcatggggcctgtagcccctgtgttttggccaatttctcccatttggaatgggaacatttaccaatgtctgtactcccattgtatcttggaagtcactaacttgcttttaatgttacaggctcacaggcagaagggacttgccttgtcttggatgagactttgaacttggacttttgggttaatgctggaatgagttaagactctggaggactgttgtgaaggcatgattggttttgaaatgtaaaaaggacatgtgatttgggaggggccagggtggaatgatatgatttggctctgttccccacccaaatctcatttcaaattgtaatccccataatccccacgtgttgagggagggacctggtggaaggagattggaacatggagacagttcccccatgctgttcttgtgacagccagttctcacgagatctgatggttttataagggggctcttcccctttgcttgctctcactcactgccatgtaagacatctgcttccccttctgccatgattgtcaatttcctaaggcttcctcagaaagccgaaccgagtcaattaaacctctttcctttgtaaatgacccagtctctgtatttcttttcttttttttggttttgggacagggtcttcctctgtcacccaggctggagtgcagtggtgcaatcacacctcactgcaacctcaaactgctgggctcaagcaatcctaccacctcagcctcctaagtagctggaactacaggcatgtgacactacacccagttaatttttactttattttttgtagagtcagggtctccctatgttgcccaggctggtcttgaactcttgggatcaagcaatcctccaaccttggccttccaaagtattggaattacacatgtaaggcacggcacccagcctcacatttaaagggcttttaataatgagttcagggccaggtgcagaggctcatccttgtaatcccagcactttgggagactgaggcaggagaatcccttgagcccaggagttcaagaccagcctggacaacatggcaaaaccccatctctacaaaaaatataaaaaagtagcccagcgtggtgaagcactcctgtagtcccagctacttggaggctgaggtgggaggatcacttgagcccaggaggtggaagtagcagtgagccgagatcgcaccactgccctccagcctgggtgacatagcaagactccatcttaaaaaaaaaaaaaaacaaaacaaaacaatgagttcatttctcctgatacgaagcaaattttgagtgcaaaaatttattgtgatttttaaaaagttaagtagttcaagaatgcatattctttagaagagcactatacatgcagggacctgggctttatcatcaccctggcaagctaaactgcctcatcaacactgtccctgcaaaagtttctgtagaagttgattcatcaattaaaagccagatccgtatatacacagctgaagaaactgccagcagttcattgctaattaccagggcaaacatttgtatttcaaagttgaccaacaggatgacaattctcaaagctctaaaaagattttgtcctaccaaacactagcctaatgtatgaccgttacccatccgtggttagtaacaatcaaaggcaacacttcttacagcaacaaatgccatgagcagtgatctcaataaattcctctttgcctgtcactataaaagccagtctggtcccaactcagtatcaaggacattattccagacagcacagtactgctatcaattcaggtttccttagcaaataagtgcttcagatatactcgcaagggctcctgaattggagttttctgcatcatctccataaaaatattttttcacctctaaagtcatcaaagaattgaagcaggcccttgggaaatatccttaaggggagagagtggctccaaaaataaccttccttccagcaccacaccaccagctcagagaattcacttcacggtgggacggtcactcaaagtctactgtgaacctcatccccaaaaaggtaatggcaaaggctagaggaaaatcctaaacaatcacctatgccttgtatctttctctagaaacacaatctactagtagaaaaaccaatttgaaattttaaaaatgtggatgctactcatgagggctgtcatcaacgtaggaaaactattaactcaagtggatgacatgtttcttttcctgtattaaaaaagctcctcacatttaataattctgatttagatcagttttgatttaacagacagcatgaatcaaacttagctaaaaccttaatgatgttgtaatatttattaacatagccaattctcaatatagaagatttatgaatctcctaatacttccactttataaactggctaaaaaaaaaaaaaaaaagaaacgctcttttgaagaacaaagtttcagggcttggaggaaagagaaagtgatctttacaaattcttcatggaaccaccggggatcttttaatccatttaaatacaaacatagaagatcagactctgatctgacattatttctatatttttagaaacacttttcactcataaatccaaggtgacaatggcattaaatggcattaaaaatatctacaggaaaggactaccacgaaatacaatattatgataacagttattgcattaaagtggttacttttctgtattcttcacatgtcccattgtatcactatacatttttataataaaaaatcgtaaattaagaaagaattcaagcaaagtattgttgactttataaaataattcttaaaacaaatgttcagaaagaaggcattcaactaagatagagaagatgctggatggagaggcttgcaaggtcccgggaggagctccagggtgaagctcatcactagcctttccagcagcactgtccctggagaccagaagcagtgggagccccttccctgtggcaccacggactcccaccaaggcacgtatcatgaacactgtacttgtacacgtttattacccttgggtgtatggggaatctaagagcacctctgaaatccatacttgattcctttttacattgaggaaagtgagattcacacacaaataccaagatgaccaatgaatggtggcctcgctggcaaaagcagccattgcaggtaaccaaattgcctccctagcattctgtaacccatgggcttagggaaagattaagtaacatttctttttcaaattcacttcaaatactcaactgtgttcatttaaaaaacagcaactatatgcacgagactaaacagatctcattcacactgccagcccacagaggggactctccgtaccctttcaggagggttttgggcaataaagccaaaatctgtacttaaataggtgtgtctcataagacaaatttttaactcatttattaaaggtcctgatggacattccaaactagtaacttatacctagagagagaaaatacaaatgcttactgtatagttatataaaaatagaaatccatcaagagtccaatcctcaagaaaccacacaatttgtacccaaaggctgtatatatatcaaggaaggatgacttccttccttgatctctaaataacaccctctccacatcggaggtatctggaggttgggcatttgcctaacgccacggggtccaccggcgggggtcacagctgctggctggtgaagaaggatttagtctccctgcagacaggattgacacagagcggacagctcagggtcagctgcttggaacacagctcgtttgactggatgtgtgaatgcaccaagtcggccagggcctggaagatagacaagaggcaaagacgcatgagaagcacagggtctgctcgtctgccatgccccctcctccagctgcccaggtcagcgctctggcttggggtttcttttcatccgagtggtgagccctttgaaccaaattctacagcatcttcctttcctgagaatcctcagcttacagaaagttaaaacagagatttcaggagatgaaaacctcttaccctacccactaggccttttctctggaaagcaggttttaaatcagacatagttataggtgggtagaaatcagaaaattggggctatctgaaggaaaaaagactgagcagataaggaattcgattttatttttgtaattaattggaactccaaatgttctaatatgtgagaaaaaccaatattctgcaagagtttctcagaggattactctctggtatgttctactaaaacgattgtaacactgtagataccttagagaacaatggatttccattaagagactcagctcttctgatgttttcaactccacactgaatcaaatgagaaaagggaggaaaaacacagatatattttattttcctttttttttcaaagaaactgctacaaaaaaataaatacacacagatacacacacacaattcaaagtctgacttcaactgttcgcagactgctcattaatgaaaaatactcatggggcagggctgtatgttgattctgttatcataaattattcctcaattcttatgtccttccccttccccattaccttcctaaaggtggtttgtttgcaaatcctttttgtggttacacttgatgaaattctcaagcaatttaaatctgtttaccattctttttttattctcttttgctagtgcataattttacagactcttcctaagtagaatgttactgtaaatatagtttcatacttgttttgatcccaagtgccaaaatgaggtaaattaacttatcgactataaaatatgtattggacctacactggaaccaattcagagttgggttttaaaatatattcttttttcttttttttttttttgagatggagtcttgctctgtcacccaggctggagtgcagtggcgcaatctcggctcactgcaacctctgcgtcccgggttcaagggatcatcctgcctcagcctctcaagtagctgagattacaggcatgcaccaccatgcccagctaatttttgtatttttggtagtggcaaggtttcaccatgttggccaggctggtctcgaactcctgacctcaaacgatccacccgcctcagcctcccgaagtgctgggattacaggtgtgagccaccaagtctggcctgaaatatattcttatggagaaaaatctaaaggaaaacaatgggaggattgtttctgtaccatccctgctcccggctccaaaaatatccactgcctaataactgaaaatggtctaattatgatttactcaggtagttaggattcttctctttcccttttcttttgatagcttttcaattacttgatcttttattttttatttattttattttatttatttatttatttattttttgagaggcagtctcagtctgttgcccaggctggagtgcagtagtgcgatctcaactcattgcaacctccacctcccagattcaagtgattttcctgcctcaggctcccaagtagctgggattacaggcacgtaccaccacgcttagctaagttttgtattttagtagagatggggtttcaccatgttggccaggctggactcaaactcctgacctcaggtgatccacctgcctcggattcccaaagtgctgagattacaggtgtgaaccaccacacctggcctcagctacttgatcttttagattagcattaacatcaggagactggcatgggaaaaacgttgagattcagcaaacacatggatctcaactgaagaggctgtattctcaaacttcatataaaagtcagttacaacagaataaccagcgttggtaaagggcattctccaacaatgttgatgggagagtcagcgatacactgactagaaaaatatataccaacactgaaattccatgtgcacctgtagtcccagctactcaggtagctgaggagaggatcacctgagcctgggattttgaggctaaagggagctatgattgtgccactgcaccccagcctggttgacagagccagatttcatctctaagcaaatttataaaatcataataaatttaaaataaaaaaattgatttccaaacatattggtataaactatattttcactgaagttttagcaagttcacaattagccaagctcatagtgagatacagaaggcatctttaaacaaaatccatagacaatgctgcaaccatttcttagccaattacaacttgcctgcaaatcctgtgtcagaaccactgacaagaaacttaggtgctccctaacttcacccatgtctgattgatgtccagcatggaaattcaaattccacggggatcaggtgttggctcaagttctgcccccacccactctctaccctgccctacacctgctgcccagtcccagagagggtgaagtctcctgcaggatggtcctccatctatcatacttggggtgaccagggccagaaactctggcagagagggaggaaagggtttcttgggtcccaacgcttccacacttcccataaaaataaagctatatattggaataggttttaggctggctctcaaaagccaggacatagatgaacaatagtttttctcctccctgaatgacaattcacatctatctcatattacaagacaccaaagatggtatttgttatttcaataatcagattgatcacaacataacagcaaacagctaattaagtgagtgcataaaagaggtcaaggaaatcacatcacacattgcttccatgttcatttcacgctcttcttttaaatgacaatgactcctatatgccttgacactcaacaagaagccatgtaataatagccctgagtaaaggtcatgattaggcaaagaaaagaaattataaaacaataaaatgttttcctttggaattagtgagaagtacatttcttttttcttaaagaaatatagttgttattactttcgagtagcccagtaactcaaactaaacaaaatgatgtcagccacagtgatccctggggcacctggtttaaggaaagcacaggtttcccctcccactgcatggaattaactcaatgtgttgagattattactcagatgaagtattattcaggagaatgaggacaccgtacatgcaaacaaatacagtaaacaatatttctgaatgatacattagttagttgcagaaaaaatttccttttaaaacaagtcatgatgggaaaaaggcagatgggtgcatttacctccttggctaaaacttgagagtactcgatgtccagctcatacagcgtttcaatatggtcactggtaaatgctatcggaaccaagaggatattcttcctccccctctcacaaagccctttgatagattcgtctgtttgaggacccaaccagggcattggaccaacctatgcgaaagatagacgaatgcgtaagtggactatgcctcctgacggtctgtagtacccctgtttgcccccctgggcacacgcactgcccactgcgggcaagagccactctttacacctgcttgaatggattttgatattttcacatggaaacttgaatcctagaagttgcctcaatataaataaataacagtttctgtcattgcagctaaaggtaaaatattaaaccaatggagctccacgagtcacttgatttccccttctatcttactcgcttgcagagttctttctgcccatggtgagcaatcaggttatggaagagcctgaccatgtgtaagagccaaatctaaccattttataactcataaaataaattttaccaataagagctggccgcccgccagtgtggaagccacttaccttggattgccacaccagtcggtaggggttgcagtactccagcctttccatgactttttggacagtggcgcttacctcctgaggatatgggtcgcctctgttgaccacctgcagcagagacacaatgggtgttcagccattaacactgggaaggccccgagagcctctgactatgtgctgacacagtgtgagccctggaacaaagccctccctttctgtctcctgcaccaatgatgatatggtctgagttcaatcaccaaacttccttagttccacttcttcatcagccaaagaaaaacaccgcagtcaatcatctctaaggtccctaagagggtggagaattccatgttccacgttattcatgggggactcacaagatctaactaaagaggatggttctctctccctcatccaatagatgaagaagacacagaaaagctgggcaggatgggaacttctaccctggtggtcatgtgtgtagttgatttcacaacaggaactgaaacagtgctgcatggacaatgtacagaactgctggatttatggtaaaccctggtggaattagaggaggaaagcagcagcacatcactgcaggttacaggcacctccaagagtgtgacctgcaccttccacttcctctctccccactcttcctgcaacaatggacaacaggcaaacactttgtgcacagcaaatgtttcatacatgatcccttgttaatacctttgaaaattttcaatgcaaattttaatgctttaaatatttactgtgtactgactccctagccctcacctggctttattttcttctataacatatattgcctgctaatctaccataccattttcatatgtattatgtttattatcttttctccctactctctgcaaacaaagatttttctctgttttcttcattcccatatcctatgatatggctggaaacagtgcctggaatatagcaggtgctcaataaatattggtgaaatgaaatatactgatagatggggcgcagtggctcacgcctgtaatcccagcactttgggaggctgaggtgggctgatcgcctgaggtcaggagttcgagaccagcctcaccaacatggtgaaaccctgtctgtactaaaaatacaaaaatgagcctggtgtggtggcgcacacctataattccagctactcaggaggctgaggcagaagaatcacttgaactcaggaggcggaagctgcagtgagccgagattgcaccagtgcactccagcctgggtgacagagcaagactccatctcgaaaacaaaaaattatatatatatactgacaaattattttatgattattactactggtctgtttaaaagccatgggaggcataaatgtagatggaatgaaggaaacacaaagttgccattaggacagcaatgtggtaattactacaaacacgatctacccatggatgctaggaaataacaaaatctctgtattgtcttaaagtatctcctccaagatatttttaattacaaagagaaaaatagtaattttaggatggatcaacacagcagacacacccttaaacaagtggccagggatcacatcaccagtagaaaagcacgctggcatcacagacccccgggtgtgaggcacagagcagggccccgcacccctgtgggttcttgccaatgatgcatcaccgcaacctaatcatgagaaaacttcagacgaacccagatggagggacgcaccagaaaacaactgacatcctaaaaatgactcctcagaaatatcaacgtgtggtggggcgtggcgcctcacacctacaatctcagcgctttgggaggctgaggtgggtggatcacctgggcccaggaggtcgagaccagactgggcaacatggtgaaaccctgtctcttcaaaaaatacaaatattagctgggtgtggtggtgtgcacctgtagtcccagtcactcgggaggctgaggtgagaggctcacccaagtctggtaggtcgaggctgcagtgagtcgtgactgcaccacagcacaccagcctgagtgacagagtgagaccctgtctcaaaaaaaaaaaaaaaaaaaaaaaaaagtcaagctgatgaaagacaagccaagtatcaggactgtcacagattggaggatgctgaggaaaccccacagccacacacagtgtgggaccctggactgggtcctgggagagaaaaaggacatttttggaaacacaagtggcatccacatgaagcctggagtgcagttaatagtattgtaccagcgctggtttctcagcgttggtaactgtacagtggttgtgtaagatgttaacactgggagaggctgagtagagggtatatgtactcttttaactctgtactcttttaatcagttttctgtaagtctaaaaatttcttcaaaataaagtttaaaaagttgtcagaagggaacgcaggggaagagaagagtgtgctagatcagtgttctttctcaactctccaatgtcctccccatacctgacttatccttatgacactgtggcatttcccggtcccacaaggacgctccagcagccaaacctggaagcagcgtgctccgtccccaggtgaaagaataaggaagtgaggccacggtcagaggaggcaaggcagcaccggaatccccacatacaaaaatgggtttcagccaggcacggtggctcatgcctgtgatcccagcactttgggaggccaaggtgagtggctcacttgaggttgagaccaacctgggcaacatggggaaaccccgtctctactaaaaatacaaaaaattagccaggcgtggttgcgtgtgcctgtggtcccaggtactcaagaggctgtggcaggagaatcgcttgaacccaggaggtggaggctacggtgagctgtgatcgcatcactgcactccagcctgggcaacagagcaagacccgtctcaaaaaaaaagcaaagcaaatgtgtttgctccaggctggttcaagggcttcccttctggcatctcaggcgaggtctcaccttacataggatgaagtggcaggaggatggacatgtgaaaaggattgcatgacaccagaaaaggaaaagcaaacccattaaaataggcaggcttccagaagagaggaatttatcttcagagcctcctaccgtccacacgaggcccagcagagacgatgagtggaaaatctgcagaggcttggccctagtagccaccagggggcggtaaggcccagttacaagagtggcccagacactgaggctgactccattcccgacattgttaaaacctcaatcacccctgtgaagatgtaattatccacctctctgggttggaaagcactggttttaggatagaatgctagttctgagcagatgaaactggttgcttattccaagcgcttctatatatcatacagtacactagcttgatcattcttgtttccaacaatacaacagctatggcacagattgtagcatctggatgaatagcctagtgtaatatgatgaactaaggaacagccagatcccaacttgatcctctatattcacttgcaaaaatgtggtcctgagtcttagcaaactgcaatggctgcctaacaagtcctgaggacaaaagcatgggattgagagcgcttgtctgaatggagacccccccactcaacacacagaaacatcaagctgagctctgctgacagggcaggcaaaagcagccttctcttaactgtcccacttattagaaagtcttatatatatcttcaagttatcattttaaagaaaagaggagctgggtgtggtggctcacacctgaaatcccagtactttgggaggcctgggcgggtggatcacctaaggtcaggagtttgagaccagcctggccaacatggtgaaacccagtctctactaaaaatacaaaaaattagccaggcatggtggtgggtgcctgtaatcccagctacttgggaggctgaggcaagagaactgcttgagcccatgaggtggaggttgcagtgagccgagactgcaccattgcactccagcctgggtgacacagcaagactctgtttcaaaaaaaagaaaagaggaaaagatctatttacaacattataatttgaattcattgttacgaggttttaagaagtgaggctagttagcaccaagtctgagatttgagaattcattcttgcactgggcttaggacataatggaagctggacccattttacacatttagaaaatgaaatcacccaatcctctatcactaggtcatcccagaaaatgttcttacttacagacatgggcagtgagtgagcagaaaacagaatgaccacctcgcttctcttctcaagtggaaaatggtccagttcctttagaatatgatctgcaaagcactgagtgagtaacaagaaaggaggataaagaggaagggaagaaagaaatggaaggaaaaagaaaataattttaaaatgaagcctacaccaaaaatctcagagcaaccctcaaaaatccgaactctcttttttaaaaaattgcaaacagtccagcctctcagcattggtttatcatcaaaatggatcataacagtttcaggggcctagggaatttgctgggaaacttctaaagctcgctaatggctcactgcaaatgcgcgctgtggatctgcttcccctcgggaaggacagggcacacttccagatggaaaggaaacacagatgggaaggagttgttttaagacctctcatttgctccgttagcaggaaaacagcttacagggtctttctaaagcctccttagtttggctttcaggcataccacattaaatacattagtcaggaatagtagggaaataagaaaatactgctctatttttataacagtttcttctgagcctcatatccccatcaagtcaatttttataaaaaccttcacaacaacagatgacaggtgatacacacccattaaattcacagagccgggaaagatgtggtaaacttaggggcccattcagtcacatctgtggaacttgagaaagaacatggttcctgcctccccctccaaatctctgtccaccagaccagggagctcccttcgtctagccggcactttgattcacgtcgataggtgctgaaataccagaactgaaggggctttctttcgtcttatactttaatcattctctgtcatttagcttataaaaaaatgctacaaaagacacaaatgggtcaactgacaaaatcagaatatgaatgtaaattaagtaaaagtttaaatattgacgttaaatttactgaagttgaatgttgtattgtggttatgtaagagaatattcctgattttagaaaacacacttaagtgtttaggtgtagaggatggtgatatatgcataacttattctcaaatgggtcagaaaaagaaatcatgtttatacaaacacagacacacacacatacatacacacacacggggcgtgtaaatgataaagcaagtgggatatacatgttaataacacatcaataggccagacgcagtggctcacgccagtaatcccagcactttgggaggccaaggttggacgactgctggagcccagaagttcaagactagcctgagcaacatggaaagacctaatctccacaacatttttaaaaattagcagggtgtgatggcacctgcctgtggtcccagctactcagcaggctgaggcgggaggatcacctgggcccagaaggttaaggttgcagtgagctatgatcgttccactcaactccagcctgggcaacagagtgaaaccctgcctcaaaataataataatacagtaatataggtaaaagagtagatgagagttccttatactattcttaatcttgtaacttttctgcatatctaaaattatttctaaatggtcctttgtaactttttaaaaattataaaggacaatttatcagaaacatgtaaatctgcacttgttggtattttgatacatcagtggtcagtgaaaactatgggataagcaaactattccctaataaatattgagatattattaatctttccagaactctcaaaatttggtaaataaatatcctaaggcataaaatggtacctaaagttaagttcccttttcagaatttataatgtaaattctcagcaaatgtgacaggattagatacaaacgaaaccaatattttctggtctttgcagtgtttggaaactaaagatgctcagaaaggattatttttggacctcagcctagataaggaggcccactgcaaggtttatacaggagcctagaagataaatttgctccaattaacccaacagctaaataaataccaatattagagaaaacagtaataaaatggctatttggagcaattactacctatgccaagcagaaatgtggattcaaaacagaatttgtagttttaaactatatttttcattttagtttagggttttgttttctggtttccaaaaatgtcatatcgtatccaaagcctagtgtttttcttttctcggcttgcaaagctgcaagtaaaaacacaaatcatatggcttgcaacagcctctaagccatcttcaaaactgaggcgccatgggcaaggagaagtgctatttaaatcacctaaaacccatctgcggtattttctactcccaacctctctgcagaatgaaagaggcaccgagcctctcagagccttcaatcacaccatctaggagggcagataaatgcctctaaaattccctttcattttatgaacagagacttcctcagttaagagacctttccatcgttttgcttccctccttttcaaagggctgaattttaatgcaaatctaattactcacttgatcagggcaggcagatgctgtgcagatccctccattccctgctaccacatgtcaatgctgacctgaaacccccctcctttccaatcgcaggcctcccaaagcaaaacccaggctgctggtgcttcaggcagtactggctggacccagcaacacagccatcaatggtgcacacagagaccacaactacacccacccctaagggtaagctccttcttttcagtttttacttaaaattggatttcaacccaagtgttaaccctttacatgcctaaggaacactgctctggggagagctggcctgatttcaatgatgtctagcaccatctagtggtcacagatttaaatgacaccaggcttctaaagaagttgttagtagggttttttgccgggagtcagaaaacgttcaaggagtgaaaaataaaatggatcaaatctaaatgacttaatatttcccctacctaaaataactcaaaagcagaaacttctactagcagaacaaaattatatttgcataatttagggcaatattttaccaattgccctcccatatttgacaggcagaaaagaatatggtaacatcagttcaaagctattaactttagaactgtaattttaacttattctcctaaaatcaagcatctgttaataaaaatattataaatataaattgcatagaagaaatatgaaatttcttttaatatgtgaaactttctcaatcgaaatgttcaatttattttcatgtctcagaacatgtagatatattacttttacattattaaaatcgtttgacattttaaaggatttagaaagtagaaaatttaattcgttggtcagtcactcaacctacaaatgtaagttagctgaaacaccatgcacaatctttaatgctcttctggtcataggaaacacaaaactcaaaatatcgttttgttatggtttgggactaatagcattaatctgaagaaagaagagtctagtcattttaatctttaaatgtattttctcttttcataataaatcaagaatataatacttttatttaatcccaaacacacaatttaagcaagggaacagtaaggctcagaaggacatccacaaacccagaagggatgagaagctgattcacactagatgctggggtgacaggcagctggcaagcactggcttacctggatgaggaggtgatgtgtgggccacctgtcaatagtgctccacttcatcgtgggcttccgtcccacttgattatagtatctgtaaatggcatttaagctgctgcctgaaatatacagagaccacttagtagatgcattttgattatggtgaaaataaaaaacagactcgtaaaggtagtatatataagttcaaagcaggtaactgcttctttactgaatcagtctaattacaatcatttcaatactctaaaatgcatatagatttaactaccctgcaaatgaagatcactaaaaagcaatcaatttcaatggactttcaaagattattgatgtcagttctagtgaaaaacaagatggccgtaaagttatgaaatataagcagtcatatttacagggaccaagtcttacaattcaaagtatgtcggccaggcacggtggctcacgcctgtaatcccagcactttgggaggccaaggctggtggatcacctgaggttgggagtttgacaccagcctgaccaacgtggagaaaccctatctctactaaaaaatacaaaattagccaggcatggtggtgcacctgtaatcccagctactcaggaggctgaggtaggagaatcgcttgaacccaggaggtggaggttatggtgagctgagatcgtgccattgcactccagcctgggcaacaagagcgaaactccgtcccaaaaaaaaaaaaaaaaaaaaaaaagtatgttattttttttccagttacaaaggttatcaatcccattataggaaatgtatgcgatggggaagaaaggaaaaaagaaactgaccattatcccagcatgctaattacagtcattgctttactctaatatggttctttttttctttatagatgttttgttttacaaagttgtaatttttaatacatatgcaattctgcatgctgagtattttgagcatctttacttaatattatgaaataaatattttccatgttatgataaaagctttgtaactattgtttgtttgtgagatggagttttgctcttgttgcccaggctggagtgcagtggcgcgatctcagcttaccgcaacctccaactcttgggttcaagtgattctcctgcctcagcctcccaagtagctgggattacaggtatatgccactacgcctggctaattttttacttttagtagagacggggtttctccatgttggtcaggctggtctcaaactcccaacctcaggtgatctgcccgcctgggcctcccaaagtgctgggattacaggggtgagccaccgcgcccagcataactattgttattaatggcctcatgataaggagagaaaattattgaagtttctgtgagttctcattccctagaataagctaaatggacaccaaatccttataagtaatctaataaacttatatttctaagagagagatggaaatcatgaaaactcaaagcctaaaggaaggcagatggtgtcaacccaatgtaactttttcctgtctaggggagttagcattggggtcacacctgaatcctatgaaaccaagtctaacacacagcctcttcctcagtcttaacatagggcaagtcccaaaacatttccatgctttccatcaccgatccactgggctctctaactataagaactattagttaggtttccagttgaaaatggtagtcaggagagagcatatcttaaatcacatatactctcagactaagactcaacttccaaaaagataaacaggttcaattttggtgagtagaatacagtgaatcagaagaattcaaagggactccattcaaggttcagaaacaatctctccagaaatcaaaaagttgtcacgaccatattcacgttacagaccgcacttcacaggtggatatcattttcatatgtgcaagggggcatctggaagctacattagctctttcaggttgtgtggaaacattcaacaaacaacccaaagaagtcattaaggagaaaatgtgactgagaaatgtgtttgtgataaagacacacactggctctgccacaatagtgccagtctaaaagatacaacagataaacagcatttgagtggcctcgaagaattaacgtacttcgcaaagccttccacaacttggatagacggatgtacctgtccttacatgagatacattcaagaaaaactaagcatacagtgaagttttgcatacactgtcacttggtagagccagccctgaaataaaaaccatagtcaatcttctgtcatgtaaataacaatcttcttaatttatctaattgtgagagcagccatttacatattgaggtatatttcttaaaacaaggcaaaagtagagcttaaaaattcataaaatctgactccttctccagtaacatatgaccagacattttgaagttgtagtggtgcatttccaaaagaaaaataataattcaggctgagtgcggtggctcacgcctgtaatcccagtgctttaggaggctgaggtgggtggatcatttgcggccaggattttgagaccagcctggccaacatggtgaaaccccatctctaccaaaaatacacaaattagccgagcgtggtggcacatgcctgcaatcccagctactcaggaggctgaggcaggagaatcacttgaacccgggagatggaggttgcaatgacagagcaagataccatctcagaaaaaaaaaaaaaaagaaagaaatgataattcaaactcttgagggtatcttagaactcaggcattttaatgggttctctgaacaaatatttaaggcacataacaagctttgactttttccaatagccttttgattctccttatggttatagaagtgataaacattaatatccaaaagcaatttgggactaagaatgtgctgacttcaatccttgcaatggaatgcaaacaaatgtgtctgtgggtgacagtagcagctttgcctacaatgaatgatacagagattgccaaacaccaattattccccagctccagttaaatatacagaaaacgacaagcagtaacattttccaaaatcaagaaaacagaaaattctgcaaagggaaccccaaactgggctttagttttaccagcaaccaactcataactgaagcaaaacaacgacaacagcaacaaaatatcagtatttcccatgttgtatgggcatctttgctttcaaaatgagaacagttacaatctttgctacatcagtaagaaaatctgggtagccataaaaaggtttatcacacaaacccagaaagagccttaaggttcattactgatccattacacaatggcattaaagcactgaacactgacagccactgcctaccacccacaccatttgtaattaccagccaagtggccaataattcaagggacagatggaccatgagatttcaaatggactgacctgaactctcgtgtttaaagaagacaggttgaatttgccattcaaattgcaaataattcatccttcccttcagtacttagactccttggttatttttgccagcaccgtatctacctttccactgtcagagagatgcccttacctgtggtggagcagctgtactgtggatactgtgtgaaagcaatagccctttctaggccatctctctccatctcttcaattgcttcttctgttaaaggatggacgtaccgaaatccaatatagtatttgtgaggggctattaggaagcacatgtggaaaggagaaagtgttaatccttatatagattcctcagagtcaacaaacataatgcaatgcccagaacaaagaacagttcatgtaatttcctatggcactgacggtgaaggcaagtttagcatattccttggatcttatccactcttcagctggtatgtgaacttttaatgatgactttctaggatcagtaccccacccacacacctttactgcacagtggtttttaaaactcaaacttctcttcctaattctctgttcttggctggcataagagagcctcaagagaaaggaggaaaaaacaacacttattctaaaatataacttcctcttgcataccagatactatggtagccactgggcattatttttttaatcatttaaacctgattttccagataaggaaacagagactctgaaggttaactgaactacccaaagtcataccttgcaggtggtcgagctggaattagagcctgggtctcccaacccatgcttctcactcctcccaggccccccacctcaccctgctcctattacccagttccccgaacccccaggccacctcgtttatataaaaaaatgcaagagctcttgcatacgtaaaaaaattcattgataacaaatgattaaaatgattctcctcattacacatataaaacagtgcttactttggaggtgccacatgggattgaaagccattgttcttggtacctaaatggcccatgcctgctgtatatcctcatgttctttccctgtcccttccctgtcctttcacgaataccctcttctatcttctttatcctcccgcatcttcctttcttgtagttcaaaaacatccacaccacataattgtttaagcatgtataaagtcataaaactacaagtttcctaaacttacttagtcttgtttccttgccttttcataggattacacataacttacactcagggatgatagtgagaatcactacatgagtgtcaggtaataaataataagaccatgataatgttactgtccaaagcattagcaggggctgcaactatgaatgtgacataaattgccacaagaaacatttaggttaaagtgaaggaaaagacgggagtttatctcatttatacctagatatatacaaggacgacattcctcctaacttgacccagagagctaagagccaggggaacacattcccaagggagaagcagaatgccattaggcgagagaagcacatgtgtgcacagaaaggctggtcggactcagtattctctggttgggtactgcaaaaaagaagaaggaagtaaaactagatcatttttagcgctctgtccattttccggccaccaatttcgtgctgccttgcataaaatggtcactagcagttaaaacatatcacaggacatgatcccataagcaaactccaaatgactgattgttcaaagattatgtgctttgtgctaaaaaccgccaactattacaataccatcaaatcccttgaagcaactcttggtgatttgagctgaggtttagcaagcaagtagaaactgctttcgattctactttgaaacaatacgatgatcagaatgacatccccagtgctgcaggtcaaccggcttctcgcattttcttttcacctgtccagtatctgaaggttacggtctaaatgcctagggtctgggagttcctcaaatcatgcatactaagaggtagaaaggctgcccttgcagataaagacaagggcaggtggccacattttaaagtgagacagagtaaaataccctggaaagaactgataatgttttctaaatgctttctaaagacaacctgtaaacacatattggagaaaaagcagcaaggtactctccaactgggcatatcctgaggaaccaacaaacagtgttcatgaaggacccgtgtccatcagggtgggtttcacaatgcagctggctgtccctggaaggatgcagggatgagaaggagcctctccgatgttaaccagtgccacatctcgtgggcagatctggccagagtgagcccaaaacacatcactcactggcctagcttacgtaccctcagagcagctgttcaatgaacagtcttcagcaagaactactaaaagacagagaaactagatttttaaacagcaaaaacttcattaatttagcatgtacaatagttcaaatgtccgatttgtacatgattttttgaaagaaaagtttgaaatatgtagcaaatgcttactttgtatcagatcatgaaccctgtgccaatgatgaattaaaaagctcacgtatattgaacttttgtcatgttaatgcctctcaggattatcgcatttaattttcacaaggatctaagagttgagttctgttaccatccccattttctagctgaggcttagttaagtaagtaaactgcctgaaccagagcagggaagccaacaccatcagagaaaggaacccatacgcctatccacgctgcatccgggaaagaacagaattatttcatgagcatcccttacttatagcttcactaaaagcagttacaagctaaacagttaaactataatttgcaaagcatatttgagatttagactttccatcacatgattacacttctcatctatttctgtatctattctctacatttctgcaatgcaatgtaactacatgaaaccatttcctgatataactcactgtcttagttaactggtcaattctatgaaaccagtgcaagtctcaaaacgtccacactggctaccaagcaacaaccacttccctaaaaaacgacagcatgaaacatgtttatctgtttgcaatcatcacattttctggcctaaagagaatttttcttaatagaaataaatcaatagacatagttcaaaagtaaactttacaactatataggaaagaaaggatcagaagggaagaggaatgagaaggagatgaagaggtaccccagcagcctcaccggagacaggaggtggcgggaaggatgccctcctgtctgtattgctttttcaagtctgacaactctaccagggctttaactcctgggctcaagcaatccttctgcttcagcctcccaaactgctggggtgtgccccacccccatgctcactagggctctttataatgatgggtactacagtaacataaaaacaggaaaaatgggaacctttctgcctcctcttcccacgagagacagcatagcaattgcaaatctggttcataataaaaccttttttttttttttgagacagggtctcactttgtttcccaggctggaatgcaatggcatgatcatggctcactgcagcttcaacctccctggctcaagcgatccttccacctcagcctcacaaatagctgggcctacaggcgtgtgccaccatgtctgactagttgttgttgctgttgttgttgttgttgttgtcgtgtgtgtgtgtgtgtgtgtgtgtgtgtgtgtgtgtgtgtgtgtgtagacagagtttcaccatgttgctcaggctggtctcaaactcctgggctcaagcgatccacctgccttggcctcccaaagtgctgggattacaggcgtgagccaccacaccaggcccacaagaaacctctgatcatgataaactgttaatgactggagtttgttctctagtaagtaggtgtgaatggagggctgacattttaaagatgcactgtggcatgcacggaggaactgcataagaaatgcccttgagccacagctttaagcaggaagcaagccgaatatgcagaagcacagttgaacaattttcgaagtgaggtgatctgagaaggggccagggccctttgttactttgtgccatgggaaccagtggattctgagaacagctggagtggatgcttgctcagtgatgtcagaaaagagtgaaatgctccttttggtcctgcctagtggagctgttctccctgagggttcccagtgtcacacacctatcctgatcccaaagctctaagatatatttgcaatgaatgtaattcatgtgtcctaagatgtacatttttttggttttaacatttctcatatcagttcagtctacaatagatgttgtcttaaaattaaccggtagtgcttttgtatcttagtattatacaaaaacagggtgtcctgcaatgaattgtgtcttcgatgtgtttaatacagcatttttacttcatccatgcatttagtggttcattctgcacactattattctggatagaggttctcagatgtgcacaatcctctttttggtgccacgtccaacaaggaccttcaataccttacaatggtgatattctgagagctgaaagcatcactgcgagttgcttactgtcctgtggcttccatgatagctagctaatactgctctaaatattctaatcagctatccaaccagaaagaaaaggcaataatagcagcagcctcaatccatttcccaaagatttctttccagtgtaatgatatatgcatctttctttcatggtatgttgcttatgccttatactctagcaatttaacaaacatctcgaacttccttttgaaactcatgtcccaaatccttagcttttttttacttgtaatgtaagaagtcatagcaaaggctaaaggtcaagggataacgcctggagacctaaattaagtgaccatgtattatgtagaaacaccacaaattgagttgccagtacatatgaagcatttagcatctactactcttttgaatttcataactacttcgaaagaactaatctagttacatgttaatgaagaaacaccatacctgtgttgggggacaattcatccagcagcttcaccatgccctctccctgcttggaagtccatatcttgatgggggatccgcctccaatcctgcggtactgctcttgaatcttgggggttcggcgtttggcgatgaatggtgccagcttactaaatcatttaacatacaggtaagtggattttattccagcttagcaacctgagaaatgttttctactcaataaaaaagaaaaaaagcaaaattttagagagcctaacaagattaagcctttaaaacagaagcttgaggtcattgacaatagccagctctcttgttgtagaataaggagctaaagctataccctctctgaggaatacccagctgtgctccacaagctgttccagcagcacacctgaagattcaggacacacaacacccatgcagagaaacctggatgtgcgctagctactagcgtaacacattttgatcccacacctaacgagaactaggatataagacaaatgaagtagacatttctcttaatttaaaaaataaagtctattaatcttatagatacacttgcatataggagcaaagatgtatgcacaagaatgttcactgcaacactgtaaacaaactaattgtccaccatgaagcatggattaaacaaattaagttacagccatatgatgcagttctaaatagtaatcaaaaaatgagccagacctatatatcgatataacgttatgaaacaagatacagtgttaagtttacacattcacaacagcaaagacttggaaccaacccaaatgtccatcaatgatagactggattaagaaaatgtggaatactaatgcagccataaaaagggatgagttcatgtcctttgtagggacatggatgaagctggaaaccaccattctcagcaaactatcacaaggacaaaaaaccaaacaccgcatgttctcactcataggtgggaattgaacaatgagaacacttggacacaggaaggggaacatcacacaccagggcctatcgtggagtggggggagaggggagggatagcattaggagatatacctaatgtaaatgacgagttaatgggtgcagcacaccaacatggcacatgtatacgtatgtaaaaaaaaaaaaaaaaaaaaaaaaggaaagtttcaaatatagtacataagtaccttcacatttgtgtaacgaagtgggggggggggtgtgcatgtgtgtatgtatgtatgtgcgcgtgtgtgtgtgtatgtatgtgtatgcttggatatgcacggactatttctggatgtaacagcgctttcctccaggtggataactgggagtgcaaggtgaaagggacacttgccttttactgtaattacttttatactatttgtagtttttatcccatgcatgtactaatttttcataatagaaatctattttgaaagaaaaaggagagaaggaagaagggaaagaaggatgaaaggaaaagaagggcagcaacaatccatatttatagtacaaatgaataataatcattgcttccctgagtgttaatcagccgttaagtgacaagtacaaatatatctttaaaaatctttaaaggtacctaggctatgtcaagacaactgcaatttccagggctctggggagcaaagggctcaaggagaatccccactaacttatttgctctctccccctgcaattttctgatatcatatccttctgatatccaacagaaaacaatgctgctgtttaaccattaccagatacgcattaaaactatttactggtttgaaactacagaattgagagacacatgtcaatgtagtgccaaggttataattgaggtgtttatatatatctcacttctgaataggaagtgtcatgaggtctcggtccaagaagagtctcagaaggaagtcgtgaacatctccaagagtttcagggcctcccatgtttagcattaatattccagttttcggcttcctatataaaataaaatacaacggttgatttgtcacacttcttattttcttccagggtggactcttggttcagccagcaaactctaatctgttccatacaaaggtaaatactatggctcttttcactgccgtcacacagatacctattcggggacatctgtggcctccagttccccatggtcccagctcagacttggacctttgtcttttggcttaattcatgatatcagtcttcactccgctagaaatgtttcccttttaaagtctcggcctgaagagagatcgaacctttagggactgggagtcaaggtagaaatctaaaattgtcctgcagctaaagcacctgtacatgtgagtaccatatgaatacagaggttacctgacctctcccaacttcaagtttcctcatctggaaaacatagcacccaccacctactcaaaatgctgttttgagaattcagtgggtaacatcttcagtcacttagcacgtgctggcacatggtaagttctactctacacagagcagggttcccccaaaattttaaacctccacagtctaataccagcccatccccactcttgcatctgctcctgtctctttagtcaattattaaattaaatgactactgactgaaattagtttttacattttatttttgaaatggattctcactctgtcacccaggctggagtgcagtggtgcaatctcagctcgctgcaacctccgccttccaggtttaagcaattctcctgcctcggcctcccaagtagctgggattacacgcacccaggctaatttttgtatttttagtagagatggtgtttcgccatgttggccaggctggtctcaaaatcctgacgtcaggagcctgcctcggcctcccaaagtgctgggattacaggtgtgagccaccacaccaggactgacttaagttattgcttgctcctctgcttccttctccaagacctccctctattccttcatccatggctcctgttatgataaacttctcctctccatcctgcatgtaaattcactgtgtagataattcctgcaagaaccggtgctaacattcaaattagtcccaggctacagaatcaacccctgaataagcaggaagaagcaaaaagaaagcagagctccataacaagttttaggtcaagcagcttctggaaacttaaaaaaacaaagtgctatgcaaaaatgtaaacctaaaatccagatcaagctccggagtcaacacagcccaaagtgagccaggccaggagctccccactcctaagccccgccagagggcaaggtgaagtcggagcaggaccaggtgcctctggcacgctggcaggagccaccagaagaccttgcgtgtccccatgagcaggtagccatgggatggcaataactggggaactaaagatcaaggagcatttcttccattcattcattcatctttttttcatatttaaaaattgagatataactcacataccacaaaattcaccataatctgaacaattcagaggtttctaatacataaggaaaggcaggaaaccatcacgactatctaactccaggacatctttaccccacaaagaatcttcgtatccattaaagccactccctgttccctcccctctcacccctggcaaccagtaatctactttctgggtctatagatttgcctattcaggacacttcatagaaatggaatcacatgattgtgtctggttttactcagcataaaatgttcatgattgtgtctggttttactcagcataaaatgttcatgctacgtgtcgtagcatgaatcagtacacttcactcctctttattgctaaataatatttcattatatggttataccctctattcactttcaataaagcagctgaaaaataaccagcctgaagtttatctaaacaccgttattatgaacgctgaggggtctacttcctgaatctcctacaccagactacctctgaccactgcagtgactaaaccaatgctgctgagacagagcctgtatagagaaacattctttatgtgctcgaaaactaaagatactatgatgacatcttttttgtttttgtttttttttgagacagggtctcactctgtcacccaggctggagtgcagttgcacaaacaaagctcactgcatcctcgacctcccgggctcaagtgatcctcccgcttcggcctcctgagtagctgggaccacaggcacatgcctccatgcctggctacttttaaaattttttatatagacagagtctcgccatgtggccccgactggtctcaaactcctggctcaggctcccaaagtgctgagattacaggtgtgagccattgccccaggcttatggtgacatcttaatgggcaatttttaaacaattattaacaacatttggcaataacgtaaggcagcagggtatgtcaaatgtaaacaggtagaaactgttttcttgatcaaacctgttgtataagtggatgaggtaaaaatctgaattctcaacctactttttcagaatacgaatcaattcctggggaaggagaaatatggcattacaatgagatcagggattttctcatttagaccccattataaagattaactaaggtcccttttcacatcaatgccttcaaccggggtttttcaacctcagcactactgacgtttggggctggagagtcctttgttgtagaggacggccctgtgcaatgcaggagccttggcagcatacctggcctctacctgtacacaataatagcacacaccccaccccagtgtgacaaccaaaaatgtctccagccattgccaaatttgtcccaggaggcaaaaatgcccccttccccctattgagaatcactgtcttagagaaagagggcttaatccccttctaaaacaaccaagcaactgcactgaagatgtggttgttatataactcttccatgctcgagtcctacaactgcattaacgggtgtgttgagttttctttccttgatatttgaaaattccagatgcattattttgtgaaactaatattcgtttaatctttctacttagaccactagtcttctcctgggatcctgtctttcaccttcaaaatctgtgactcacaataaattaagtgcattttcccatggattgctgccagttaacagattactggttaaaaaaacctcaggctaaaagacttacctaagccacagacggtatcagtgtgcaaacgggatttagagctgtttttcatctataacacctgagctcagaacaagagtggctttaaaggggatgctactctgccctgctcatggttttgcaaacgcatgttgatcttacacatgaaagagatgcacacgacttgaaaatacctaaatacacatgcacttaattcaaaactgtgttgtgcatgatgaatagcgcattagtaagccccagtctgacacccctctattccagaatgtgaagtgaaagctttagtcaagggtctccatctcctctccctccagacagaacacacctgagaccaaggtctgaacgttcatgttccgtttgtttgaatataaaagtgtatacagcaaaatatatttaaaacttctcacttggaaaggtttcaacattttgccatttttatatcccaggactctcaaaatacaaggtttttccgtgaaatattaaatgtacgtaacagaaacttaagcttgtcaattaataaacaataattctattctactctatatggtcagcctcaagaaaaagtaatacgatcccagctcttcattaaacctctaagacatgattggcctgtgggtctatgatgcctctagaacagaatttggtgaactatagcccatgcactaaatctgtatacacacatacacccctactgcctgtttttgtaaataaagttttactggaacacagctcccctcattgtttatgtaatatctatggctgctctcacactacaacagcggagttgaatagcagcaaaagacagagtttggcctacaaagcctgaaaaatttactacctaaccctttacagaactaatgtcaacccctggcctagtgtagtgtctactctagtattgcagtctagtccagcccaagcattaagcagcacaatgccttcataatgactgccatcagaagaatccacaaagacactcactgcttcaccatttctaatattaaaaaactagaaatcacctacgtgtcccagaatgttggtcaaggtagtttatgacttaataaaatactcttcagttactaaaataatatagacaagtatttatgatgataaagtaaataaaaagagggcattataaatatatgatgtacagtacggtcacatcttgctaaatacatacagagtgaatatttaatagtcatacagacaaaattggcctggctggtcgctcacacctgtaatcccagcactctgggaggttgaggcaggaggactgcttgaccccaagagttcaagacaagcctgagcaacacagtaagacctcgtctctattttttttttaagaagacagagagagacaaaatattgggtggtaagattattcataatgttttaaggttttttttgttgcctatccgtattctctaaaatgatcccatttattttatataaatatgatctaaagttacttagtagaatttaaagactttcatttaattttaataatattaagcctacttatattaatgagttgctgctagaaaaacacacaaatgaaataatttttcttctaggattccaaactgaatcagttcttcagtttctatcaaatcccaaccctcagtgcatatggctgaggtggggagaggggctgggaggggcaaggagaaatggaatgggccctgcttggcaggctgccagatgaagaaggtatctaatgcccatccccaactaacctcaggttacacagcactcagtcatcatacccatgatcatatagcaaaaaacaataaacacacaataagaaaattttggttctggccaggcacggtggctcgtggctcatggctcatgcctgtaataccagcactttgggaagccatggcagaactgctggaagccaagagttcaaaaccagcctcggcagcaaaatgagacccccatctttacaagaaaaaaaatttgttttaattagctgggtgtggtggtgtgcacctgtagtcctagctacttgggaggctgagacaggaggatcacttaagcccaggagttcaaggatgcagtgagccatgatcacaccaccgcactccagcctgggtgacagagctacactcctcaaaataaaaacggtggctcacgcctgtaatctcagcactttgggaggccaaggtgggtggatcacttgaagtcaggagttcgagaccagcctggccaacatggtgaaaccccatctctactaaaaatgcaaaatcagctgggtgtggtggcatgcacctgtaatcccagttacttgggaggctgaggcaggagaatggcttgaacttgggaggtgtaggttgcagtgagccaagatcaagtcactgcactccagcctgggtgaaagagcaagactccctctcaaaaaaaaaataaaattacaggctcatgcctgtaatcccagcactttggaaggccaaggcgggcggatcacttgaagtcaggagtttgagaccagcctggctaacatagtgaattcccgtctctactaaaaatacaaaaattagccaggcgtggtggtatgtgcctgtaatcccagctactcgggaggctgagacatgagaattgcttgaacccgggaggtggaggctgcagtgagctgagattgtgccaccacactccagcctgagagacagagtgagactctctcaaaaaaaaaaaaaagatatatatatatatgtgtgtgtgtatatatgtgtgtgtgtgtgtgtgtgtgtgtatatattcatacctgtataattttcatcaaacaatgtgtgatctagcagaaaggtcatggagttaaataggtcccagctactttctctcactctgcctgatgttaaagggtgctgtttctatgtactcatctcgataacttccctttatagagtcttctgttgcctctgtacagaggaagacttgggagcggttgtgactcctgttactaaagaggacccttgcaacaatgccatgcctgctgccagccaccagcaacagaagaggtgaggtatgaaacgtgtacttcacttctttaatagatgataaatcctgttacttcttttataattacgttcactgtgttaagggatgaaaaacaatactctagcttcctatagaaattcttggtagaccagttattcgttatcctgtacagaacatacatttcataggcataattatgttaggttcgtaaatacatttccagcatatataatttgtgttatgtgacatattccagaaccaaattcttaacacaatttgcagactgtttgtactcaactctgtgtcttttaacaatagccctgttgcagggaaggatccagtggggaaggagggtgtaaaatctatggtttaacagctattgaaaggaagccaagaaaatagctccttccacactggcttttcccagcacctttcctcccaggcagcttgtgtctattggtgtctgcatcgataaagagaaattcttatttgtacctgatgttagactcatacctcttctgcggttgaacttgaggttttgcaccctgggcatgctgggctgtttctgtggtgacggccgctgcagctgcacctgacttccacctccatggctgacagaccctccagctgctggatgccactgtgacaaaattaaagtgctcgcatgaaatctagctagaaagtaatttcttctgaagaggtcctcagagcataattcctgactttaaaatttaaagagatcccatggcagaaatgattttcctagcatttctctgcaggcaggtaaaggaacttaagccctctccaaggggatggggtggaggatcgctcccctaggatggccgatgagagcctgcagagaagcattttagaaactacacacacctcctctccccacctcggctgcagattttgatacaatccctcacaagaacccctgcacgagaccaacatgactgacagtagcgtgctgctcctgtggaaggagaaggggctgcagaaaagtgaaaagccgccgatttcgggagtggcgagtgggccagtttccaaatagctgcagttctcctttctgcctccaagccttcttcggaaagcactcgtgctgagaacccagtactgcccttgaaccttgacaaggggcctctgcttcccagggcctgttctggccctcctcccactgcaccccaccccacggggtatgcagtctctaccaccaaggagacatgccaccccaggagtccacatcccacgtgccagaccaggctcccagcgccccaggattccctgtcccccaagctccacacccactcccagggtctgtgcaggcattttttcagatccatcctcctgagggaggttgtgccatcagtggatcaagtcttgacctgaatggtggccaagggatagatagctgtttgcaggggcaagagtggaactgggcatgaagaccagagagtccatccaggctgtctgtgaggctccccacaaggccagaaagagccagcggcaagaagagaagcaggaaagcatgtcagtcagaggcaactctccaaaggcctctacacttctgcaggaactcagagagttcaagagctcatccttccaggttgtgatcaaggtctatttgtcaacataggaggacagaacatatttcccagtttgttagcttgctatatcccacataccatatatgtgccttcaagtatacccttgtcctgggccccacaggaggtggcagtgggtctgaagaacccacctgaattgaggagatcatgtgccatactcagctgtcatatgaagagtactggtccttaaacagccagtgaaatgaaactgaagccatataggaagtactgaagatggccatgtgagacggtggttactgtggtgcctggtgctatgcacatgacctcttccccattctcaaaccagccggttagaaaccagcttgcgatcagtctccttctgccctcctcctcctaagaggcaaaggtgccctgaggaggaattcaggctgtgggttaagcagctctgactctgaattcagctctgccacttactagcaatgtgacctggggccaggtcttcctgagcctgagtttccccacctgtaaaatgacaccttgctacagggattcttgaaaggagtagagcagaggagtgaagcgttctgcagtgtccaccatgtgattagtactggtgttagtttcaattgtcagtttctagaggacgggaactatacctgctctgattttatcacctagcatgtctgtaaaatataagagaattatatctccaggccattagatttccaaccacccagattgtacacattcctagcacagccaatcatgtcagcttatgctgaataatctttaccaactcaaagtggaagtgcaaagattccataaagaagttcaattccatctggtttgagttggtgttttaaaaaaaaaaaaattcaattccaaggctcaaaccaactcacatctccttttttactaagtttaattctgaacttcatcgtgggatttaaccaggttcctaatcatgctgcaatggccctaattccttatgagtgagattgtatcggattccatggggcatgagaatgaaaccttggcattccacagtttgactgctggtacaagtttagcatcccaaatgtgaaaatccaaaatccaaaatgctccaaaacctgaaactttttgagcactgacatgacactcaaagaaaatgctcattggagcattttgaattttagattttcagatttggaatgctcaatctgtaagtaagtatattccaaaacctaaaaaaaatctgtccaaaacacctctggtcccaagcattcaggataaggggtactcaacctgtaataaaatgacatttcctccttcaaacctaaaaaaaggaaggagtgccaggtgtggtggctcacacctgtaatcccagcactttgggaggcagaggtgggaggatcgcttgagcccagacatttgggggcagcctgggcaacatagcaagaccctcgtttctacacaaaatttaaggagttaaaaaaaaaagaaaggccgggcgcggtggttcatgcctgtaatcccagcactttgggaggccgaggcgggtggatcacgaggtcaggagatcaagaccatcctggctaacacggtgaaaccccatctctactaaaaatacaaaaaaaaaaaaaaaattagccaggcgtggtggcgggtgcctgtagttccaggctgagacaggagaatgacatgaacccgggaggtggagcttgcagtgagacgagatcacaccactgcactccagcctgggtgacagagtgagactccatctcaaaaaaaaaaaagaagaaggaagcggtggggagggactagattttccaactagtagatgaggatttcctaataaatttgggagctagtagcttttcaagctgcttaactattaccatgtcttacttacaaaattattttctccatggttcaccagattctcagagaggagaatgatgtcgctgccaagggaccctttccactcaggttcgttaatacactcacccttcaaggactcatccaaaacactcctctcccctaatgatctgaagattctagaaaaatgaaaagcgtctcctaccaaacaattagcattcgtccaggctaaaggagtttaaagtaaacattcaaagggccaactgagactctggaaaagactcagctcacagctgaagagaatctgatggcacgggcagcattgcgtggcgtagagagtacgtgttcggaaaccagagagatctgagcagaaatcccacacgggaccaagaggctgtatggctgggcctgggccactcactgagatgctgcgagtctcacttttctcatctgcaaaatagtgataaggctacttctgcagggctgctgtgaagataagaggggaaaaatatgtccagccccaagagcaatgccttgcacactgcatgtggctgagcaaaggggtgaagaatatccaatagtatagacttgcccatttatgaactaagaccaagtaattctgcccctcctccttacatggataactgatctacctttagaaggcctacaaacaggccgggcatgggggctcacgcctgtaattccagcactttgggaggccgaggcgggagaactgcttgggcccaggagtttgagactagcctaggccatgtggagagaccctatctctattttgtttaattaaaaagaaaaaaagaaggcctacaaacaataaaaatgatcaaaccgacagataagcagcaaaacagaagatgacataagaaaacgaaacttcaccgggcacagtggctcatgcctgtaatcctagcactttgggaggccgaggcgggcagatcacaggtcaggagatagagatcatcctggctaacacagtgaaacccatctctactaaaaacacaaaaaaattagccgggtgtggtggcacctgcctgtagtcccagctacttgggaggctgaggcaggataatcccttgaacctgggaggcggaggttgcagtgagccgagatcatgccactgcactccagcctgtcgacagagcgagactccgtctcaaaaaaaaaaaaaaaagaaaacaaaacttcataactcctgcagtggtggacacctgtagtcccaactacttggaagactgaggcaggaggctcacttgagctcaggagttcaagaccagcctaggcaacagagtgagactcggtctcaaaaaaaaaaaaaaaaaaaactctcaaaaaacaaacttcataattcctggacaaatccaataggtgatcattcagaagtatacctatgacttaagaagttcctaagttatgacttcatgttgttgcaaaaagaaataaagaaaaaggaaaaacagaaaaaaaagttcttaagtatcaactggttcttcaaaaccaaattaatattttggatccttgtgggcgaggcagaagagggtggggggcgagatacacaagtattgaaatctataatggcacttttctatcacataggagatgaggattacttcaaaagtacttataaaatatgcaccgtttttaaaattaacaaaagaaataaggttctatattataactattaataaacatagtgggtgcttcaaaatattggttagttgctgatatggagccaaaatgttctaatgtctcttatgtaaaccctacaactcttttattatcctagaattgtttttctaattacataagacaatatatgctcagtgaaaaaaaatgtttggggggccaggcacactagatcatgcctgtaatcccagctaccagggaggctgaggcgggaggatcacttgatcccaggatttcaaggctgcagtgaactatgatggcaccaccgtacaccagcctgagcgacagagcaacactccatctcttaaaaaaacaaaagaaacaaaacgtttaaagtttggaaagaaaaaggcaccaagaaaaaaaataattcatatagatagctaaacagacagataatatatggcccacccccggaagcttcttattaattctgtaatatgctaaatacataaagtataaaactttgcttttccacttttactttcagaactcattttcggaaataatcctcagtgttttctcacacagaagttgatcttttcctatcaaccaaaatgatgaagtattataactatgccttcaaatcaaagtctgtaacacaaataagactccaaatctacttctgctagcgtttctgaatctttccacttttaacctagactacaaataatttaaagtttcacatattgttccacgacctcaaatctaggacctgtcagactttatttgccacaggaaaggtcagtgaaagaaaagattagttcaatacttctttcagccccacgactggcactgtgctgcctcttcttaaaaaacaatgccctttgtcccccagcgcccttagtgagctagcctcattgtacactgggtccttagtattttcctaacaaaggcacgtctaatgagatatggaggttcagaggggattccctccactccaagtaggtgtcagactgacgaacgtcttagaaaaatatgtccggtctgtgtccagtcaccgttcggatgcattgaataagcatcttattcgtggcagccttctgcatgaatggctagacatcttgaggatgcctgtgtactactgtgtgccaggcaaggtgctcatgttcaaggcaagccttaaaaaaaaaattaggatttcaatgtacatttaccaaagctctggcgaggttaggtgccttgttcaaggtgtcacagttggaaatgctgtcccagccaggtgtgtgagatccacagtcccatcagctcatcctgtggtcacaacctattcacggtttgcatcagaaacgtgggaggctgttcctgggtcttacaagttccccagatatctctagaaaacgctagcccaggctgccccacggggggtcccgctgctaaggagaagtgggcacagagggaccaaggaccatgggctttcctcagcagggagggaactgcagggcagatgtccatggtggtgatgatgaagatgccttccttactatcctctatggcaggcccataacataccttccctcgcgtaatcttctcaacagcctggttattgcaggtgacaataaccaaggctctgggaaattccagccactgctccaagccacccagccgaccgatgggacttgaacctgcgcctcctggatccgggcgccctccccgcggcctcccgagccctgagtgctgccctcagccctcccttctccgcgacgcccctcgcccggttgctcgcagcacccccaaggccgctccccgaatcccccgggcgcgagggcccgggcgccagctgcccgctctgcccacgccttctcagggatcctggccctggcggccgccgcgacagacccacttacgcggatcgcggagcaggacgcccgcggcgcgcagggccgcagccatgtttgcgccgagtgaacgcattgcctgggcagcctcggcccgagtccgggctcctcccgcggcggcgcgcccaggtgtccgcccagcagtggccgagccgggtagcgatccccacgcgcgtccccagccccctgacctcgcgccctcccggcgcgcccgctcattcgctgccgggccggggcgggcgaggccaggcagagacacgcccctcgcggagagcccgccccagctgggcgccgctccctgcgtgaaaatgggcccgggggctgagctagaagcccgctccccaccaccatcgcaggtcactgcaaaacctgctggactcctagttgcgtgccctgtttgcatctgccaaactagcgaagtcaggatcctcagccatgactcagcaaataacttttttcgacgtttccattactattatttagatataaggatgcttttgcctcagttctccagtttgcctgcctagtcacaacacaagtgtgcagatcctgttttgttttgctttattttcagaatagaaaaagggattattcagtttctctgcaccctctctgtgtagcagaatttgacaggtgaaactcactgaagagcattaggaaaagtgaaggccagcctggcaagtgcatttcttggagggacggtatgatgaggtttgtctgtatcatatccgcgcaccttcccagtttagccgcccgtcccgcccccaaggtcgcacactgagatcactgggaggaacaggcgcccatttcattcctacacctccgtcagcccaccctgcctatatatgttcagtgcattgtggagtaggaaaccagcccttggtacagaaaggtctcaggcatcggtattcattgaacaaatattgagcacctactatgtgcactgggaaaacagtagtgaaaagagtagacgggggcttacatggggttaggggagacacagaaaataatcacaacatgtaatactttgaatgatggagcccttccacggcctcccctcttctttttccctctcaggacaaaagaagaatgaagcaaggtaaaagagatggggtagggtgggggaagggactaatgcaatttgaagcaggtgggtcagagtctcacacattcgagcaaaggccttatacacatttgagcaaagggggcaagccatatggaacattcagggaagatggagtctagattcagctgaaacccagttttctgtagcttaaatatgtgctactgatggaattagtttatttcttattaaagttggtcctcctgatggttataagcccaatgcaaaatgtcaaattaaatggatagcctttcatattacctacatgatcttcatatccaagcggatgtcctgagaaaagcacagtaaaacctgctccaggtatcaacccaccttccttatatgtgtggctattctctaccctcataaaaaaattatagtcttcttaagttgccctgtaaagaggtgatcttcatggataacatacttctctacctacagtctgaacccatttttgttgttgttgttgttatttgtttgttttgtatttccagtagatacagagttttgccatgttggccagactggtctcgaacttctgacctcaagtggtccacccacctcggcctcccaaagtgctgggattacaggcgtgagtcaccatgcgcggcctgagcccatttcttctaaagaaactaaattgaaaggctgcacacctcgcaatgctgtgctggcagacatgtagacaaggccagagaataaaatggccgggggggttagacgtctgagctatgaaggctcttcttgtcccctctgggaggccctggagaaagtcatcccctccatccagggtgctgggccctcctgctgggtagagataagggggcttctggtccctcccaggcaaacgctgatgattagtgacaaggcataaaggtgccaagtctcaccagtacaaaatcaatggctggcgtgggttaaatttctgtccagaaatgattatggaactagcaagacatactttattaaatattttaatgaatcagcatcatttcatttcttttattcgcatcttgcactttcatttttactgacttctttttttattttttattttttcattaattaattaattttttttgttttttttttttttagagggagtctcaccctgttgcccaggctggagtgcaatggcacgatctcggctcactgcaacctccgcctactgggttcaagtgattctcctgcctcagtctcccgagtagctgggattacaggtgctttactgacttttaaaaactcattcaaaattcctcatgtataaaacctcctggtgcacatattaagaactcatgggttataactgaaaacagaacttcattctttttccccaacagagagtaccataacaattgttattcctaatctatggcttatttcttacaaacattgaatataacagctttccaatgagtaaatttttatgttcttatgcagtgaaagcagataaaatgtgctttatgttggtccttttcaaaactggtagaaaacacagtccttaatccagaaattgtgaactctaaatacaggcttaccagaaaagcccttgaaaggctaaagaaatttgcggaaccatatgatatacataatatgaattttttctgacttaacatatttttaacaaaatgacacaccaattccattagcaaacagaaggctaaaaaggcacagtgtgtgggctaacggagataaggagcaccccaaccaggagggagagggtttgtctggggcctggtgagttcattagtgaataaagcactcacctgtcacagacaccactctgagtgcagcctgtgatcctaaataaaatgaatttgttggtttcagctcagtgcttcagggaaaggggtgggaaatctcttcattcattatttgccatgattggcacctctgagctacacaaactaaatttagattattcaactctgattccttaatcagaaaaataactggggaagggaggaatcaggaggcattcagggcaagagaaacagtggctgcatgtaacaaatggtaagctataatgattactcagagaaatctgatcaattgtccctagaatcattttacaacaaagaggccaccaaatccaggccaacatgccatgcgttttgacttgcccctcttcaccacgcagagccttcagcccaatggtggtgacgggtttattaatccatctgcccatatttcctgaccatctaccatgagcaaaacattaggtcatgtagaggataaaagagtgaaaaggaaaacaaacaacattctcaaacagctcattcgcttatgaaacaagcgtatgggagactccagtctatgtcaggcacatggcaggcactgggtgtgcagcaatgaaccggacagtccctaatttcacggaacgtaccttctagaaggcaaggcagacaatcgttttacaacaaagatgaaagacatacaacatattgtcaggtatggctagggaccagaagaaagctaaaggaggtggaggaagggagagaggccgcaactgcccaggtcagtagtgcagtcaggaccagcctctctgcaaaggtggcatttcagcagtgacctgaagggagtgagggcgttgtccggggaagggcttgcaagcagagaggccagcaagcgctggaacacatttgaggcttgtattcatttcctagggctgctggaacaaaataccacaaaccaggcaggcaaatgtgttgtcgtccagttttgaaggctagaaatgcaaaatcagggtgtcagcagggctgtgctccctctgaaacctgtaagggagaatccttccttgccttttttagctcatggcggtggcaacaatccttggcgttcctcagcttgtagatgcagcactccatcctctgcctccacagtcacagcctgtcttctcctcttggaaggacgccagtcattttggattaaaggcctactctaataacctcatcttaacctgactgcgtctgcaaagaccctgtttccaaataagttcatgtttacaggtacctgggggctaggatgtcaacatgtctgttgggggaacacaactcagccccataacaaggctgtcaaagaacagcagggaggccacatggcttgagtaggggggcggcgagaggtaggggaaccagggcggattgatgtagaactttgtaggtaatgaaaaactgtgtcttctgagtgacctccattcttcacttatactgcatgactaaatgtgcccattgtggctgggtgccgtggctcacgcctgtaatcccagcactttgggaggctgaggcgggcagatcacctgaggtcgggagtttgaggccagcctgagcaacacagagaaacccgtctctactaaaaatacaaaattagccgggcatggtggcacatgcctgtaaaccagctactgaggaggctgagacaggagaatcgcttgaacctgggaggcggaggttgtggtaggccaagattgcactgttgcactgcagcctgggcgacatgagcgaaactccatctaaaaaaaaaaaagtgcccattgtgattttttttttttttttttttagctcattcatactgggtgttttttccagggttctctgcttcctgggtggtggaagggtccctaagaggcctttctgatttgcttcttccaggacccaggggtcccaccagtcttagaccaagtttgtgtgaatatctcaacttggttgtcctgttccctgcagttgtataaattcacagccagggagtaggcattccccagagccctgggaagatggcaggcttccttgtgcttctctgggctagagagccaattttctggattacttttcacagaagtgccgggcctctgcggccctgcttcatggaggggtctggttctagctccaccttcctatggctgcatgggcattctaggagctgggcacatgatgtgttcactgtgaaaactcatggagttgcatgcttatgatgtatgcctttttctgtataaatgttatactttaatgaaacttttttttttaaggggccccttggtgcctttatctggctgggcactggctgggctcaattctccctggagcccccattcctaacctaacagctctgactttgagattctctctagcccctcccctccaattctgatacccagagatgttcctttctcacctaggattttgagggcaaatagatgtatctagtaaatctgtttataatgcggtaacaagaggtgagcagaagtttccctgataaaagtgagagagggtttcaggctaagaagatgaaggaatgctttccatcgaggaggtgtctgaacttacaataagaggactgagataggctgaatgtgcagagacagcaagaaggtggaagagcacatgagaaccaggagcaagaccttcacttggccatagcacagggtatggcgaggactaggagaaaaggctggggtcccagcccgaatgcactgagggcttggcccttcataggccagcagaggcatcaagagccatgacagtcagggaggtgagcagctgctgtggcagagaatactgagcaaacagggtgtgggtcataggacgtaataggggccaggcaaggagaccaagctggacagagtggccacaggtgaggattgaggtgtggagcagagtggcaatggaagtgaagatggcaggggagcaaatggtatggagaaggccaggcccagtggctcacacctgtaatcctagcactttggaggctgaggcgggaggattacttgagcccaggaatttaagaccagcttgggcaacatggcaaaaccccatctctacaaaaaatacaaagattagctgggcatggtggtgtgcacctgtagtcccagctactcaggaggctgaggcaggaggattgcttaagccagggaggccaaggctgcaatgagcagtgatcacgccacttgcactccagcctgagcagcagagtgggaccctgtttcaaaaaatatatttaaaattttttaattaaaaatttaatttttttaaaaaaagatatggagaagtcgagaggacaggcacaggttatggcatcttaaagataagaagcaggctggaatcaagtaactccaaggtttctggtcttcatgaggccgaaaaagagaagcacattagttagcagcagagctggtctgagacaaagctgggggctctttgtcattgctgttctcattgttttgtttctaaccacatatattttatgctgcaggaagtagaaaagacaaagaggtacagctaatttttttttttttttttagacagagtttcactcttgttgcccaggctggagggcaatggcaccatctcggctcactgcaacctccgcctcccaggttcaagcaattctcctacctcagcctcccgagtagctgggattacaggtgcctcccatcacacccagctaattttttgtatttttaatagagacagggtttcaccacattggtcaggctggtctcaaactcctgacctcaagtgatccacccgcctcagcctcccaaagtgctgggattacagacatgaaccacactgtgcctggccaaatttttttaaaaagttttagtggtcattgatatagcaatagtgattgaacctagccattcattcatcattttttcagagcctgctatgtgccttgcatagcccaccgctgcccacaagcagcttatacaccagcagagaagcagctatctaaacaaagagaaataaaaggtacagaggtctgttctgggttccatacagcagcgggaggcaaggggcagggctgtcaggacagcccccaggcagaggctgctggtgccccgtatcatttccaggaagacggggcggctgctgggggacaggccttgcaggtcaggagggcagcaagccctgtgacagcaagatgggttctgcagctgctggttggtcagtgagaagggacgatctgaaggatttagcgaggtgagtactgagtcctggaggtgggcaggggccggctcacagggagcctggtgagccagggtcaaggtctgggctgggtcctgtatgccacagactagagtagctgcaacaaggaaagttaagacaggcttctgggtcacactcacatttagcccgcaggaaaaggagtcacaataactgtaatggcttccatttattaagtgccagacatggaatcgctgcaactggcttataaagaggaggtaccaccctgttttacagatgaggaaaacagagtcacagaggtcccctgacttgcctgaatccagttagcaaggggcagagccagtatttggacccaggtatgtttggctcccaagccagggctggctccataccttcagggtgcatctcacaagagaaaaaggtgacagaaagcaggggtcaggccaggcatggtggctcacacctgtaatcccagcactttgagaggccgaggcacacacctgtaatcccagcctttgagaggccgaggcaggcttgaggtcaggagtccaagactagcctggccaatgtggcaaaaccccatttctactaaaaatacaaaaattagcctggtgtggtggtgtatgcctataatcccagctactagggaggctgaggcaggagaatcacttgaacccaggaggcagaggttgtagtgagccgagatcacaccactgcactccagcctgggcaacaaagcaagactctgtctcaaacaaaaaaaagaaggcaagcaggggtcagagagcgcctatggagttctcaccactcacccaggtgttcctgtcaccaatgtcacggatttgttagaggcactgaattatgaattcaaatttgtgcgtgaacctgaatgcacgaaggaaattcttttttaacagacatagccagagaataataggtatctacccattcccataacccagttaaatttcacttataacctttcagagttacatactgcttttttcccatttacagagaattcatcattctccttgctattttttccttcctaatagctaataacggatcatttcttcccttttgtttatgcccactcccttttgattggtcttcaaatacagagtaatgacctctgggtaaagatggggcttgaacactagggtatagtttcactctctcccaaaaaccacactgaaatgatggtagaggttttgttcatgacggtggtattttttgtttttaagcacaaacctaaaagaatgggaaaaaagaaaaagggaaccaccatggaatttttaaagtggcagcagatgaataaatacttaatgttttagcagacctgagaaaactgaatcctaagctggccatccgtattaaacaaaaaccatccagattacactagggggctcaggactggcagtcgcaggtaccactggaagtagggatgaaaggagatgctagaatgagatggacggaaagtctgttaaagcaggctgggcacgatggctcacgcctataatcctagcactttgggaggctgagacaggaggatcccttgagcccaggagtttgagaccagcctgggaaacacagggagaccctgtctcaaaaaataaataaataaataaaatcaataaaataaaattaaaaaaagagtctgttaaagcagcagattgcctagattcccaccctgcagtggagtgactgctccccccaaacccctaaagctaactagatgtttggttcctggagaggtaacagagggctatggactgcagatcccaagcacagctgagagcagggccaccacagaaaacagcttagtgaactgtactaactgaaggtgcagagacccagccctcttctttttccctccacaggaaacccaactagcctaagaagaaagacctaacagacaatggcatgggcctcccctgctaatccacctagggcagatagcctacagtaaggctcacatctattcacatgcttggagcatccaatggacattttaatctcctatcctgaattatctctgaattttcagcagataaccaagcagcacctgccatctcaagaaagcctgtaacaggaaagccagagaccaaacaaagcaggaaaaaaaaaaaaaaaaaaaaaaaaaaaaaagcaacccaacgtggaggaaactggaatgatacaggaagaaaactagaaaacttagataaaaaactaaagacagaactttctgaaaccggaataagaattttttaaaatatatttttactatggttaacagaaataaaatactcaaaggactggggaagagttgaggaaaacgccccaaattagcagcttaataaaaaagatggccaggcgcggtggctcatgcctgtattcccagcactttgggaggctgaggcaggtggatcacttgaggtcaggagttcaagaccagcctgacggacacggtgaaaccccatctctactaaaaaattatgaaaattagctgggcatggtgccatatgcctgtaatcccagctacttgggaggctgaggcaggagaattgcttgaacccggaggcagaggttgcagtgagctgagatcacgccattgcactgcactccagcctgggcaacaacagcaaaactctgtgtaaaaataaaataaagtaaaataaaataaaataaaaagataagggccaggtgtggtggctccactataatcccagcactttgggaggccaagctgagaggattgcttcaagcctggaattcaagacctgcctggacaacatagggagaccccatctctacagataattttaaaaattagctgagtgagctggcatgcacctatagtcccagctacccaggaggctgaggcaggatcacttgagcctgggaggtcgaggctgcagtgagctatgatcatgccactacactccagcttcagtgacagagtgataacttgtctcaaaaaaaaaaaaaaaaaaaaaaaagacaagaaaattgaaaagaggatttctagtatctaaatagcagttgtagaaagaacaaaaaaacagaggggagaccttcaatgaaacaatttaagaaattttttcacaactgaagggcatgactttctgtattgaaagggccaattagaatggatactctcaataaatatcatcatgaaatatcagacattgaactaagcttccagaatagacaggtcatatgtaaaggaccatatatcagaatgcttaggaattctcaataacaacaccagaaaaccaaacttcaaaattctgaaggaaaatgctttctttttattattatttttagagacagggtctcacactgtcacccaggctggagtgcagtgacacaatcatggctccctacagcctcaaactcctcagggcaaaagatcctcctgcctcagcctcccaagtagctaggattacaggtgtgtgcaccatcacacccaactaatattttaatttttttgtagcaactgggtctcgcaccagccttgccaacattgcaaaaccccgtctctactaaaaatacaaaaaattagccaggcgtggtggctcctggctgtagttccagctacttgggaggctgagacatgagaatcacttgaacctgggaggcacaggttgcagtgagccaagatggcgccactgcactccagcccgggtgacagagtgaaactccatctcaaaaaaaaaaaaaaaaggcggtctcaaacacctggcctcaagcaatcctcccaccttagcctcccaaagtgctgggattatgggcatgagtcatcgcacccagctggaaaatgctttctaacccacaattctttatggagagtatgtgaagatagatttaaaacatttttagacaagcaaggtctcaatgaatttaccttccatgaaccctttctcaaaaaactactggacagccaggtgcagtggctcaggcctataaccccagcactttgggaggccgaggcaggcggatcatctgaggtcaggagtttgagaccagcctgggcaacatggtgaagccccgtctccactaaaaacacaaataatctgggcgtggtggcagacgcctgtaatcccagctgcttgggagggtgaggcagaagaatcgtttgaacccagttggtggaggctgcagtgagccaaaatcatgccactgcactccagcctgggcaacagagtgaggcctcaactcaaaaaaaaaaaaaaaaaaaaaaaaaaaaactgctggaggatgtgctcaaccaaaatgaggatgtaaactgaaaaaatcaggaaacatagaaaacaggaaacaggatgtccagtacaaaaaaaaaaggtaaagggaacacacaggatggtaatgaaagatcccaagatgacaactatgttcctcgagggcaactcgttcagattaaagcaggcaaaggctccagaagatgggaagaagtaactgatagacaacccaatatatccaaacatcttttgtgattgaattattaaagaaaaaataagacaaatttagtatagggaaaataaaaagttgggcagaaagagaaaacaactattgtgaactatgcagccaaccaaaattataattgaactaagttggaaatatggcgacatggtttgaacgtttgtcccctccagatctcatgttgaaatgcaatctccagtgttggagggggtgcctggtgggaggtggtggtcatggggaggaatggcttggtgctcttcatgaagtgatacatgagttcttgcactgagttcacagcagatatggttgcttaaaggagtgtggcacctcccccatctcttgctccctctcatcatgggatatgctggcttcccctttgccttctgtcatgattggaagtttcctgaggcctcaccagaagcagatagcaacaccatgcttcctgtacagtctgcagaacggtaagccaaaataaaccacttttctttgtaaattacccagctgcaggtatttttttatagcaaccccaaaacagcttaatacacttggggagatgagaagggtgaacacgaatggtggggataggaaaaggaagaaatgaaatccttatatgccagagaagggcaataaataacgcctaaaactgaaaaatcaataaagtaatataagcatgttatttagcaatttggaggtaaatactgaaaaaaagctaaaacttttgaacaccttcatttctgtaagttggggtactaagacaagttttatccaatacaaacttgattttgactgtagaaactagtctttgtcccacaaacaaagtttatcaatatctcttcaaagatgttcttcacctgatcatcacattggttatgatccataaggcagaaggaaacttttcagcataagaaactgagtcattaaccagcaatttccaaatactagaaattgcagtatttgtatatcatgacatcccttttttcccagaagggctggatgaaatatacttattctatggcaattcaaaattcaagctttgaagtttctcagccctcagtgttcccatttcaactacagagattaatacaaaatcaatagagaacctacagcaataataagagaggcttaaggttgagtttagaagtaggaggaagccacctggcgactgtcaacctcactgtgcaacaacctcccctggggagcttttaaaaaataccctggtcccatttctgaaattcagattcaactggcctggggtaaggcccaaacaccattatttttaaggtccccaaatgatcccactgtgctgccaagattgcttttcacagagttgaactactctacgtattaaggacaacatttttaggaaccattacgaggcagcaaggtggcaggggctgaacggcaaggtgggaaactgggtcgcttgaaatggctgaaggacatttaagagggcaagttgatatttaagcaattgaattagcctcctgtttgtctccaaaactgagcaggtcacacaagtgccaaaggtggaggggtttttggtatgaaaagcagagagtttcagggaggagaaagtcacgtgatggaagtcctgagagggcaggggtgtttgtgagctagccatgggaatgcgggatggcatctgtgacacctgaattagggtagtaactacacagcgaagggagtgaagtccacacgcgtgaggtttgctgctcaccgtgctcagtctctcggcctgaggtcaccaccttaactcccttatccatatcctggctctcctttaatattttaaaactttgacctgtttacaccattaaaattaaggctaactgagcctaacctcttcactttaattctgataaaatgaattgcttagttgaagtcatctacagctcattcacactcttccaagtattttttatttaaagatgcaggctgaatagattataaatgcatcatttcttcctttgtttttttttttttttttgagacagtctcgctctatagcccaggctggagtgcaatggtgcaatcttggctcactgcaacctctgcctccggggttcaagcaattctcttgcctcagcctcctgggtagctgggattacaggcacctgccatcatgcctggctaacttttttatttttgtagagatggggttttaccatgttgctcaggctggtcttgaactcctgacttcagatgatctgcccgccttggtctcccaaagtggagggattacaggtgtgagccactgcacccagcctaaatgcctcattttgacctgtcatttcacttaattgcaaaacaggataaaatctaatgtgtccaacagtaacacaaaaaagattacaaaaaagatttaaccatgacccacatatctaacgttaaaaaatcattcgttctcattaccatataacgttagcaatatctactaaatttagtagtacttaatttcacatatatacatcataaaaaagataaaataattgcaaaagcatgaacgaatgtgacaaagagatgtttagctttaagaaaattaagccagcaaagagtttttacgggtgttcatttattgactgctgggaatacagcctattgagaatacatgacatgcatttggtggagaaatcaactaaatctgaaatgaagccattcagtaagcctgctgtgagttaataaggtagcacagattagatctaaggacatggtgggggcaactcaaacagccactcacaattgttattaagattccagctacaatttcttttggaacttatttattcttaattacttaggaattaccaggaaagagggaaaatcaatctgcctctttaccttaaattaatgctaagagggatactgtgaatcactaaaaaactctccccaaaattatgttcttacttcaaatcctttaaggcaattctatttttacaaattcttcaatttctatgcctcaggattattagcagctaagcagagttagaaaagattaataactgatacaaaaggctattcatttgattctagtgtttactgctgaattatactgtgttctaatatgagcagatttttatacgatattgccaatttcttcccccaagatttttgttttaattcattgatgcaataaaataaatcaaagaattcaaggtacacttaaaaggacagaaagataagttactggagtatcttacaccataatctaaaattgttgaattatacatacatataacttgaataaaatgaataacttggataaagtgagtaaaatgctgaaatgtatccctaactacagtttcatgccaggtattttccccgaactttgtttcccgaacttaagaaaaaaatggatattttttcttaagatgacaaccttaatatcacttgatgttcaggtgatttgagatagtttttatggtagtagaaagaaaaacagaaagagaaaccccaatgaaacaaaaaaaggaagattctggctttttgttttcttttttaaagagcctgttcctttcataatctttcctccacgcttctggagaaaatggttatggcgtgcaacgctggacaaatcgagggtataagcacacgtctcggatgtgatacctattcagaatccacgttaagaatcgttccaagcccaagccatatcctccatggggacatgtaccgtattttctctgtttaaaaaaagaaagaaagaaagaggagtaaatacttaagttaaaactttcatctaagacagttaaaattttccaccatgaaaggagttagctcactgtggttaagaattcaactatggccagattcagtggctcgtgcctgtaatcccagcacttaatctctatgccttcatgaaccatgcataaagaaataatttggtatgaaaaaatcaaccagggaataagtactaccctggaaagaagagatttttaaaaacttttaaaataagtcaatgtctatttataagaggaaaatgaagaagggtactagatactggtaggatcaattttttaaaactcagttgcaatcaacaagccggccgttaaacaggttttcaaatgaaattaacatataacttggccaaaacaaagctggcaatattcacacaccacattataacctgcaaactgaatatagctcattcaaataccaaagtactaccctgaattctccccttttaaaaatttcaatatatacagaacgattacagtggaaaaaaatgttgagtacttaaaaaattggttttacctgatccgtataccagtaatagggagtggggtcaatcccttcccttttataacctgccagtatttcttcactatcaaagatacgcattgagcctcccacaatctcaccaacattgggcatcaacacgtcgacctttaaatataagtgaaagaagatacacaattactatcaagcgatcagacacagcactgccctagagtttaaatgaaaattacaattaagctccaagggctaaaggagccactatgatcatgtaatattcaaatgtttacatttctctaatttaacaaagcatgtcaacttcaatcaggggagggtgaaaaaacccaacgtctttaaatattgttattctagatagagaatgaaatatttggcatgagctgtacctgattccagatgacagtccccacccccttaaaaagcaaaattattaatactctttgaaacagaaactgacagattcagtaagacgggaatcctcaggacatcgctgcatgtagaaggacttgatctccacaggaaatcgacacagcaagattggttcattaatggtgtctgtcatcagtctctcaggagcttctgggatatcctgaggtcaaacaagacttcattaacatttacaacttggatcgcaacaagacagaagcagctccttcaccctgtaccagtccttcctcctatcaattcaacagagtagaggatacacacctacccttaacccatacacatttgtgtaaagaataatttctttcaaaaagaaataaacatattcttaaaactcagttatttaatgaagcataaaagatctgtctccctttacagcatatctcaagcaccatgctgtttgatgaaggaaaataaaaaaaaaaacaaaaacaaaagccagccccaagctgtgactagacacagctcagtatttttctcagtggcccgttttgtctagctctgaagcaaatgaggtccacttagtcccgtaaggcatacggtaatcatgaatgctccagaacatcattgatctacacacagagtatattactaatgacacttatctttaaactctcctgttatctacccttctttcctgttgtaatcaatcagttatgccttcgatgacagacacaatcataagacaaataaccaatgtcaaactggtaagtgtaagcacacctggaatagttacccaaacaatgttagatgatgacttaagcgcatcagtttctctctcaaaacatccttctataccacacataaattaaagttaacacagaagttaaaactgacaactctcgtcccagtaaaaatggattgagagaactggagaagactcatagatttgtttaatgaagaagtgaaatggaggtagcaatcacctagcacacctgttttcaagctccaggctctggagcccttgcgtcctcggagacgccgagaggtaacaggagatgagtgggagagctctagtctctcagcttgcatctgctttacacagcggggttctgcataagatttagttaggggaaaacaggtcttatttcataccccccaaagcctgagggtcatgtatccactctagtgtcctcatgtgtgtggaacagtagcaatgtatagtaaatgctgacaggctccccctgccattgtcctgcctaggcatttagctccggtagtccccacaatcttgcaaaacagatgttacttccaaggtagagataaggaacctgagagggggtcactggtcttcagttacacagcacaaaagaaaagaggtgggagctaagcccacctggggggccttctgactccacagcttgtgttctttccactcaactacactattttactaagtattaggaacactaaaagtatgcaagttctcaatacaaaattttgtcattatacatcataaactgaattcataggctgggcacagtgtggctcatgcctataatctcaacactcgggaggccgaggtgagaggactgctcgaggccaggagtttgagaccagcccagtcaacacagcaatacctccatctctttaaaaaaaaaaaaccaaaaaaccaaactgaattcacagaaacaagagtgctttacatagacccagtatattgtttcacctattaattccttctaaaacccaaaactagttagcagcatctacacacatttcaactgtaaaacaattagatgtgcaaatattatgtaagtaatggttaaatgcacaggaaagagggcctagcatagtcttggaaacttgagccagatgcagtggctcacgcctgtaatcccaatactttggaaagctggggtgggaggactgcttgagccaaggagtttgagaccagcccgggcaacatagggagacgccatctctacaaataataaaaaattagctgggcatggtggctcacacctgtaatcccagcacttttggaggctgatgtaggaggaacacttgaactctggagttcaaggttgtagccagctatgatcgcaccaatgcattccagcctggacgacagatggagatgctgtcccaaataaagaaaatttgcaacccaagtgcatgctgggagagtggttctcaggcaaaaccgaaatgctaagtttacctggggcactaggctaccttctccaagaccttctctcttggttttgcatttttaaccaatggctatcttctttctcgccttccacattaagaagttttaaatcactgttttgggggaggggatgaacctctttttaaaagcacaagatacattctccagaaaaaaaaaaaaaatatatatatatatatatatctatataccaacattttgcatgtgatttcaaaggcttcacaaccttctaaagcactcctaccagcctagagaatgataaagagagcttataagctgtggccaaggaagaacaatgaaggaagagggaagaggcaaagcatgagacatgaaggcagcttagaaactcacacttggccagaagcggtggctcacgcctataatcccagcactttgggaggctgaggtgggcagatcacgaggtcaagagatcgagaccatcctggccaacatggtgaaaccctgtctctactaaaaataaaaaaattagctgggcatggtggtgtgcgcctgtagtcccagctactcgggaggctgaggcaggagaatcgcttgaatccaggaggcggaggttgcagtgagccgagatctgagatcatgccactgcactccgtaggcgacagagcgagactccgtctcaaaaaaaaaaaaaaaaaagaaaaaaaaagaaactcacttacgcttactgggtggtacagaacaggcactgtcctaaggctgactctgttaactcagcgaatctgcaggcaacccaagaagcaggtcctgctgttaccatttatttgaggacaggcagatgccacccatgttactagttcattaaccagaagaagagaattggagcccaatcccaccttggaaacaatgagagaaagggatacatacttctccaaattcatagaaagttccatcttctttctttacatcatgttcttttagccaaacgatagcatctgaatagttcatccgtttgaaaggccgtttggggggctgaaagttctacagaagaaaggaaaaatataatgtgtatatatacataaatataaacattaacactaaaatttccattaaaaaactattataaagtattacttcagtgaggtgtggtggctcatgcctgtaatcccagcattttgggaggctgaggtgggcagatcacttgaggtcaggagtttgggaccagcctggccaacacggtaaaaccccatctctactaaaaatacaacaattagctgggggtggtggtgggctcctgtagtcccagctactcaggaggctgaggcagaatcgcttgaagctgggaggcagaggttgcagtgagcagagatcgcgccactgtacttcagcctggcgacagagtgagactctgtctcaaaaaaaaaatatatatatatatatatatatatataacttcagactagaaaactatgtagacattcctaaaatggaaaacatgagcctgttatataactgaaaacattataaaattattgacagtgactaacatcaaattctagtcttcaaaataattagtcacttatttcagctcaccaagccatcaaatctacaaaaactgagggtgaagacttcattgtcttccaaaaaaggactgtgactttttctttccataaacactgcacctaccgggttgagctcatgcactatgctccctgcaggtgacttcaatattcgatctaccacatcacaaaccaagtcctccaaccggttcaggaggtcgtcaaaagtcaggaaaggacactcagcttccacgtgagtgtacctgaagaacgagacaatagctcagcactgcttttctcctgcactggttttttatccagcaaggcttttaacattgggaagctgtccataaaatgccaacaatgctaccaattcccaactttgcaaattagctgtggactcccctcttctccactgagtagcaatttcttgtttgctcctttatatataaaagatcaagtcaaagtgaaaaaagagaacttagctacgatctaaggtggcaaaactttgttatatgttcttccattaaccacttaatatatcagttggttttttttaaaacataaacataatttacctacactaagatttcttctctaaagatattacctagaaagaaataaaacaaaaagacaacttcatactcagccaggtgccttcgtgttctggactgctctgcccggtatgactgagcaatacaaaaaacatctcccagggctgggaggcaggtctccaagtacaactgagaggattgagtcaaaaatgcctcttccccaaaatagtcaagcttgaagagtgtggcaccaccttctacttgtgtttgcactaatgttggaggagtaacctgttcaaatgcaaagaaggaataaatcaatgctatcgtgagcaccactattcaagtttcaaaacggcaaaaaacatattctttgcaaaagctgacgaatgcatacttacttcatagtaccccctatcaaagaagtgatctctaaagcacctggtgaccatggatcgtgcttttaggattttggacatgttttctcctcggatcatcatgtgtctgttgttgagctggacatcaacgtcagactcctcattgatcaggttgtcagctcctccagcaggggccaacccaattagttcccagaagtcacaactcagctcatggccacctggagcctgcattttttaaaagtggggtccagagaaagagggaaaaggaaataaaaaattaacagtattgaggattttaatttatgtcaaagttttggtaagctgagatttttaagaacctcctaattctcagctttagtttagttttatattgatatttttaccaatgttctttctggataaatacacactcacatacacacaaatatcttttttttttttttttgagacggagtctcactctgtcgcccaggctggagtgcagtgacgcaatcttggctcacagcaacctccgcctcctgggttcaagcgattctcctacctcagcctcccgagcagctgggattacaggcgcccaccaccacgtctggctaatttttgtatatttagtagagacggggtttcaccatgttggcaaaactggtctcgatctcctgacctcgtgatccgcccgcctcggcctcccaaagtgctgggattacaggcatgagccaccatgcgcagcctgtgcgtttccatttttaaaagatatttgtgtctgggcacggtggctcactgaggcgggtggataacgaggtcaggaaatcaagaccatcctggccaacaaggtgaaaccccatctctactaaaaatacaaaatattagccaggcatggtggcgcacgcctatagtcccagctactcaggagaatcgcttgaacctgggaggcagaggttgtggtgagtggagatcgcaccactgcattccagcctgcgcaacaagagcgaaactccgtctcaaaaaaaaaaaaaaaaaaaaacaataaaaacaggctcaaattctaataagaaattctctgaacatatttaggtgggttgttaagtttttatttccatctggctgaaaagtaattcatatatctacagcacagtggctatattatagcccatgaggatgattcaggaattccgtaaggctggaaatcattgtattctttttatcacctgagttgtacaatgtacatatttcactggaaaaggcatagtgaatttgacatgtacttcacatttattgtatttatatgctgtgatggttaatattaagagtcaacctgattggaatgaaggatacaaagtattttctgggtgtatctgggtgttgccagagaagattaacatttaagtcagtggtctgggagaggcagacccaccctcaatgtgggtgggcaccacccaatcagctaccagcctggctagaaaaagcaagaggaagaaggtggaagagcagacttgctaggtcttccagccttcatcttcctccggtgctggatgcttcctgtcattgaacatcagactccaagttcctcagcttttggactcttggacttacaccagttctttgacaggggctcctgggcctttggccacagactgaaggctgccctgtcggcttccctacttttgaggcttttgaacttggactcagccactactggcttccttgctccacagcttgcagatggcctatcgtgggacttcatcttgtgatcttgtgagccaattctccttaaaaactccctttcacatatacatctatcctactagttctgtccctctgaagaaccctaatacatatgccaaatgtacaaacaaagacactggaaaacaaaccaataaataaactattcattcacccagtgcgaaactcaatccactcacctgcttgccctttggggtaagatttagcattccatacactgcaacactgctctccgtggacaagagaactccattgtagcactgacactataaaaaggtcaaagctcaaatttagttattcacattgatttaaaaattctaccatatagaaagttaaagggattgtttacaaacaagttatctgatcaaatactagtaaaataaagagtgagatggccactgattcttaatattaaaatagatatttttgtggaagacagaggtttatctatatatagacatatacatgtaaatatatacatatacatgtaaatacacattttacatacatggataaatgacactgacccacatcacttaaaaatatctggacagtttatttatttatttttaaaaatctagactattaaagtaacatacaggttaggcacagtggttcatgcctgtaatcccatgaaggaggctaagttgagaggctcactggagcccaggagttcaagaccagcctggacaacaaagggagagataaataaaataaaaattggctgggtgtggtggttcttgcctatagtcctaactactcgggaggctgaggtgggagaattgcttgggcctgggaagtcgaggctgcaatgagctatgatgatgccactgtactctttctgagaaaccctgtgtctcaaaacaacaaacaaacaaacaaaaccatacagagcccatctacactataatcacttcttactaaagtcattaggaaaaaactgatggggaactttaaaaggaagaagtcaggctgccaacacctgaacccactagtcataaaaaagacaactggccgggcacggcggctcacacctgtaatcccagcactttcggaggccgaggcgggtggatcacctgaggtcaggagttcaagaccagcctggccaacatggcaaaaacctgtctctactaaaaatacaaaagttagctgggtatggtggcatgcacctgtagtcccagctactcgggaggctgaagcaagagaatcacttgaatctgggaggcagaggttgcactaagctgagatcacgccactgcactccagcatgggtgacagagcgagactctgtctcaaataaaaaaaagaaaaagacaaccacaccttacatgcctcttgacgtgatgcaactaaaagaacacagctttgcccatgaagtagttgtgccaaaaaactgaacctaatcagacctaacctccaatttataaaaaatgcagacactagaagaacatgctaaaggacaccacaaggatgcaaacaaccaaatccataatgtgagaagttccacaggacaatccaccagggttttcccaagaaatacatagtaatgggtggggagagggggcgggttgcaaaagaagagagaatgcaaagagagcagcagagttataaagaaaatttcaaagtcatatcactaaacgcagcatgttagtcttgtcagaatcctcgttcaaatcaatcaactataaaaaggcagtacgaactgataacaagaatctggatattagatgatatttagtagttgtattaatttggtggagggtgtgataatagtaggtgactattatctttttttttttttttttttgagacaaggtttcactctgttgcccaggctggaaggtggtggcatcatcttggctcactgcaacctctgcctccctggctcaagagatcctcccacctcagcctcctgagtagctgagactacagatatgcaccaccacacctggctagtttttgtattttttgtagagataggatttcaccatgttgccaggctggtctcaaactcctgggctcaagcagtctgcccacttcagcctcccaaagtgccgagattacaggcatgagccaccatgcccagccacattatttttcttagagatgcataagcatgtgtaattaaataaaatgatatgatgtctgaggggcagtatcataccaggattagccatatataggtggttacagaagctgggtgatgggcatttgatgattttttatatggttctattttgtaatgtgctggaaattttccacaaaagttttctccctctagccttattaaggtataataaacaaataaaaattgcatgtttatggtatacaatgtgatgttttgattcattgacattcactgtcgacataataaatgttttaaataaatgtatacaaaacaataaaggaatctactgaaaacatctaattttcaggcataaataagagaaaatatttaccaactcatccgccaagacacactgaagataacctgtaccatctcgcaacaccagaaacattaaattctttcctaaaaaatgagaaataataatttaggcagactgttctcaaggcattaaattttatatatatatataattttaaagatagggtctcacttcgtcacccaggctagagtgcagtggcacaatcacagctcgctgcagcctctacctcctgggctcaagcaaacctctcaccttaccctcccagatagctgggactacaggcacatgccaccacacctggctaattattttgtagtgacaagggtctcactgagttgcccagactggtctcaagctcctgggctcaagcaatcctcctacctcagcctcccaaagcgctgatattacaggtgtgagccactgcacccagccatgacttaatcttatctaaaggaaactccaaggttaaacattcaagttcagacctcccacatggctccctgcccctgaagtacccactggtaataccactactcagtatttgtaaaatattttattttcaatgtattggactttcaaatcctacatgatccccaagatccacacaaccaggggaaagcaggacagaaggcaacatgagttaagggattatgccttatctacccttgagtcccctgcaatgcctggggtagtactgtgcactcggtgatacataaatgttcttgaacaaaatcactttttcttatttatgtcctaaaggtccaattactgaaatccgcttaaaacatttcatttgtatttttgtcccctccaccgtcgcttttttttcagatggagtttcacttttgtcgcccaggctagagtgcaatggcatgatctcggctcactgcaacctctgcctcccaggttcaagtgcttctcctgcctcagcctctagagtagctgggattacaggtgctcacaaccacacccagctaatttttgtatttttattagagaagaggtttcaccatgttggccaggctggtcttgaactcctgacctcaggcgatccacccgccttggcctcccgaagtactgggattataggcgtgagccaccgcacctggcctgtcccacttttcaatgaaagatttgctaatcccttacaataaatagtaaaagtgacatgtttatatattataaaatatataataaaaggggaaagaggaaacaaaatgtcagaaccaagggagaatgcaaatatactgtttataagagtcaaaactatggccaagtttcagactcagatgtcaacctcctatagtaacatcccttgattttcactaaataattaaaactcaacttgacaaatatttactggacgcatcttcatcactataattgctaaccattaaaagagcatttaaaaatttttatactttcaatagtcattttaaacaagaacaaatttaagatataaatcactctatcctttaaagccaggtgaggtgctatgtgcctgtaatcccagctgctcaggaggctgaggcaggaggatggctggggggagttcaagtctagccagcataccaaaaaaaaaaagagggccgggcgcagcggctcatacctgtaatcccagcactttgggaggccaagacagtggatcacctgaggccaggagttccagagcagacgggccaacatggtgaaacaccgtctctactaaaattacaaaaatcagccaggtgtggtggcaggtacctgtgataacagctactcaggaggctgaggcaggagaattgcttgaacctgagaggcggaggttgcagtgagccgagatagcaccactgcactccagcctgggcaacaaagtgagactgtgtctaagaaaaaaagggggagagaaaaaaacccctgcaaatctttgtatgtttttcttcatctaagagcagggatatttaaacattaaaaagaaggaaaagctttgccatttaccttgcctgcgcagcctgtggacccagccaaacacctttactctttggcctctatatccttctaacgcaccaatcttcacctgtcaaattgaaataaacaacatttgttcaataatgtcatttatacacaccaactttttcactaatattaggcagacggtagtaagtgttaaaaatcacaaatggtgcaaaactggagacagcccctctactgcagctcagaaccaaacgcatttcactgtattggcatggtttaaaacaaaacaaaaaaaaatccaagtcttctttcttaatgtaaaactgataatgagaaacacccagaagaatttcagatattgctagataaaattaattaataaatgaattcctttgtcataagtggagcacttgcttcccacaacagcaacaatcccagtccacatgaagccttttccatgaccccacagttcttcaataccttccagaacatggtacttaaaaggctagcttttgtttgggggatgaaggagagaggagatgagtagaggaaggggctgttgcatgtggccaaaaaaccccagctccatcactaaggaaataatacaaaaattcatcagcaataagaactactggaaatctggctgggcgtggtggctcaagcctgtaatcccagcactttgggaggctaaggagggcagatcacctgaggtcaggagtttgagactagtctggccaacacggtgaaaccccatctctactaaaaatacaaaaattagccaggcgtggtggcaggcacctgtaatcccagctacttgggagtctgaggcaggaggatcacttgaacccgggaggcggaggttgcaatgagctgagatctccccactgcactccagcctgggtgacaagagtgaaactctgtctcataaataaataaataataaaataaaataagaactactggaaatcaaaccattttcattcatagtccagcaatctatttgggttccagaaagaacagaagaagagtgaatctaatttcacaattcacaaacttttactctatttaaataaaacatgaaaatcatagatttcaacctcttcattttataagcaaactgacactagagagggttaaatcacttgaccaacatcatgaagcgtagccaggcctgggtcccccatctgctggcattcagttgggacagaattcattcaacatgcatttacttaactgtgtaataaaatgaacccctaaagaactagcctcataactctaaaacattatttctctatgtcccttctgaaaggaaagtaggccaggcatggtggctcacgcctgtattcccagcactttgggaggctgaggtgggaggatcccttgagcccaggagtttgaaaccagcccgggcaatatgggagactgtttctacaaaaattaaaaataaataaaagttagccaggtgtggtggtgcatgcctgtggtcccccctacttgggaggatcgttagagcccaggaggcagaggttgcagtgagcagaaactgcaccactgcactccagcctgagcaacagagcaagaccctgtctcaaaataaataaattaaaatttaaaattaagaaataaaaaataaaaggaaagtaggccgggcgcagtggctcacgcctgtaatcccagcactttgggaggtcgaggtgggcagatcacgagatcgggagatcaagaccatcctggctaacacggtgaaaccccgtctctaccaaaaatacaaaacattagccgggcgtggtggcgggcgcctgtagtcccagctactcgggaggctgaggcaggagaatggcgtgaacccgggaggcggagcttgcagtgagctgagattgaaccactgcactccagcctgggcgacagagcaagactccgtctcaaaaataaataaataaataaataaatggaaagtaaaaacaaaatgtaaaggaacaaaccatgtgacatgcccctcatacacagaaataatgatctgatgtagccaagtccacggtatttgaaaagataaacaaacttacacattttggctctgggagacttggatcatttttaatggtaatcttctttgcttcttccaggttcttttctcttcgtaaactatcttctgcctaattttaatgatgaagcagtttgttaacatggttgccagagttctaactttaacaacgttcacgatggcaaggtcaggactcacctctttcttttcccgggattcactcttcatttgttccctatgccacatctttttaatgttcttcaactgtgatttagaaataacattccacctctcattttctttttgtgaatctacgtaaatggtaggaaatggttctttccctactgtcatcaaagccttgggtagggaggagagaaaagacagttcttgaacattgtacaatacttaaaatcaaaataacatctcaagtataaggcaactggaacaatctaagcataaagaccccaacagccaaaagctgatattggcacagtgactggttgaacatttaagaagcacactggttggctgggcgcggtggctcacgcctgtaatcccagcactttggaaggccgaggtgggtgaggtcaggagatcgagaccatcctggctaacatggtgaaaccccgtctctactaaaaatacaaaaaaattagccaggtgtggtggcaggcacctgtagtcccagctactcgggaggctgaggcaggagaatggcgtgaacctgggaggcggagcttgcagtgagccaagatcgtgccactgcactccagcctgggcaacagagcgagactctgtctcaagagaaaaaaaaaaaaaaaaagaagcacactggttaaagctgaagctctgaggtcctctcacaaacaattacagcaagttcgggtatacacgatacagttccccaggaaaagcagactataagcaacagatcttaagtggctgtagcaaccagcacaggtacaaggacaacagaagagacacctgacagcaaaactcaactgcaagtgacatctaaaaggttagttctctgtgagaaatcagagaagtgtcagacatttttgaaactttcaacaaaacaatggttaagaacacaaaaagcggccgggtgcagtggctcaggcctgtaatcccagcattctggggggccgaggagggaggatcaccaggtcaggagatcgagaccatcctggctaacacagtgaaaccctgtctctactaaaaatacaaaaaattagccgggtgtggtggcgggcgcctgtagagcttgcagtgagctgagatggcaccactgcactccagcctgggcgacagagagagactctgtctcaaaaaaaaaaaaaaaaaaaaaaaaaaaagagcacaaaaagctaaactcatttaatctgaaaaactcccccatgtagaatacctcttttccccaatgggacatatcaagcattgctgtgttatatatcatttgataaaatgtattgtttgtagtttttaaaaaatagttcaaagtacataaaagatgaatattttaaagcctcaaataatctttcaaaatctcttccaagttattgaatcaaacaagaaatgcagtgaattattctctgttgcaagatctgcagcctgcaaaaacggactttttctcagttctacgactgctgcagagaaggagggaatctgaggccgggcatggtggctcacacctgtaatcccagcactttgtgaggccgaggtgggcggatcacgaggtcaggagatcgagaccatcctggctaacatggtgaaaccccgtctccgctaaaaatacaaaaaattagccgggtgtggtggcgggcacctgtagtcccagctactcaggaggctgaggcaggagaatggcgtgaacctgggaggcggagcttgcagtgagccgagatcgcaccactgcactccagcctgggtgacaagagcaagactccgtctcaaaaaaaaaaaaaaaaaaaaaatagagaaggaaggaatctggatcttttgaaaacattcaagggctgggcgtggtggctcacgcctataatcctagcactttgggaggccgaggtgggcggatcatgaggtcaggagttcgagaccagcctggccaatatgatgaaaccctgtctctactaaaaatacaaaaattggccaggtgtggtggcacacgcctgtggtcccagctactcgggaggctgaggcagaagaatctcttgaatccgggaggcagaggttgcagtgagctgagattgcaccactgcactccagcctgggtgacagtgtgagactccttttcaaaaaaaaaaaaaagaaaaaaaagaaaacattcaatagttcatccttttaacaactagacattgtaagaatacatgtaggggccaggcgcagtggcacacgcctgtaatcccagcactttaggaggccgaggtgagtggatcacctgagctcaagagttcgagaccagcctggccaacacggtgaaacaccatctctactagaaataaaaaaaaaaaaaagaaattagccaggcatggtggcgagtgcctataatcccagctactcaggacgctgaggcagggagaattgcttgaacccagaaggcagaggttgcagtgagccgagatcatgccactgcactccagcctgggcaacaagaacaaaactctgtctcaaaaaaaaaaaaaaaaagatagccattgatgaaaatgcaaaaccaagagagaaggtcccatgaatacatgtaggtcgttcggaattcacttattacccgacaatctgtactgatccctccttttgtatcattgaaattgaaagagccaaactatcagttcccaaatcagaatgctacacttttgttaacagtgacattctgttgttaacagtgacattctgcaaacgttcatctaaacggtgttgtcagttttcaggagctgcaaaacgaggcacccgataatccagaaatgaaagatttccccttaagagtggttaaaaagtaaaacccagccaggagtggcggctcacacctgtagccccagcactttgggaggccaaggcagcaggattgcttaagcccaggagtttaagaccagcctgggaaacataatgagatctcgtatctacaaataagaaacaaattaaccgcgtgtggtgacatgcccctgtggtccgagctacttggaaggctgaggtgggaggatcccttaagcccaggaggttgaagctgcagtgagccatgaatgcgctactgcactccagcctgggcaacaaattaagatcctgtctcagaaaaataaataaataagttaaattaaaaacaagtacccatgtatgacacaccaaagtttataaccatatggtatgacctaaaagagaggagaatgctcccagattaggacttgatagtaactataaatgttgtaacacagttaacaaaaaaaggggatgcacagaaaaaggagtgtcaaggcactgcttttcctaatacagttcaaagaaggaacttttttgttgttgtcgtccaggctgcagagcagtgatgcaatcacggctcactgcagcctcaacctcctgggctcaagtaatccccctatctcagtctcccgagtagctggggccacaggtgcataccataccaccatgcctggctaatttttttttttttttttttttggtagttggctgagtgtgatggctcactcctataaacccagcactttgggagggttaatatcctgtctctatttattttttaaattaaatttattaaaaaatttttaagaagttaaattttttgtagagatgagggtcttatcatgttgcccaggctgttctcaaactcctgggctcaagcagtcctccagcctcagcctcccaaagtgctgggattacaaacgtgaggcaccaaagcccagacccaaggaaggaacttttaaccatcttccttatgtggcagttatagccaatggattctagcatatgagttcaacagctaagtccatggtctattttaagaaggttgtcttaggccacactttactctgatataatcaactacctaacacccatgttgtgagtccaagccctttttttgttttttcttctgagacagggtctcaggctagagtgcagtggcgcaatggtggctcactgcaacctccaccttccaggctaaagaaatcctcacctcagtctccggagtagctgggaccacaggcacgcaccaccatgctgggctaatttttatgttttttgtagagccaggatttcaccaagttgcccaagctggtctcaaactcctgcgctgaagcaatccacctgccccggcctcccaaagtgttgagattataggcgtgagccaccacaccaggcctgagtccaagctcttgacaaacccctttgagaatgagctaaactcattcaaggattctagatcctgagaaataacagcactgttaattcattaacagaatgttaataaattggcattctagcttgaagctccagactcatgagtcagctctgacaaatgaatccattcttggtggtcttggagtcaaatctcaggatcacactctggattgtggtaaattcaccaaaagccctctcaggagccccctggtcatgagctcactgtaactgaggaaaggtaacttttatctttacaagaattgaaaacccagcaatctgactcaatggagagaaaaattccaagaagcaatgccatgtggtaagaaagaagagaccttttttcaaaatgttaaaaagtaagtttagactttgatcatctaacaatcttaaagtcacatatctgtatgcattccttactttcccttttctgaaaattctctttggaacctagtgtttgaaattaagttcttggcaagtcacaagaaaattgacataactcattaataaatgcagtctcattttcctaatgagaagagactctacctttagacctgttttaaatggtttctccttggttccatctcccgtggcatcgcttccctctcggtcagagacgtacagctctgctgtttgacaaaatgagggtaagttatggtctggccattaactattagtcaccttactactttattcattccttatctttgtaaacagaacaagcatcgattaataaaaattgaggtccataagtaattaatatcctagttatttccccactccatttcaataacatccatctcataaaaacattagttaataatccaggttttcaaaatgaactctgatcattttaatttgtgatatttattctatctaattgggcacccaaaaataaaatatgggctttgaagttgatcagacatacgctggaatgttggattttgtaccttaaaaggcagggtgactctggagaatttacttaacctttctgagcttatttctttacctataaaataggaaaaacaatccccatcttgaaaggctgtgctgaggatgaaataaaataacacatacaaatcagatatcccagtgccagtttttgtagagatggcaaataaacaccagctccctctggactttaaaggaaacagaagctctgaggttagaaaatttcagaaggcctcacaactagtaggtctgaacagttaacatccatccaggtctctctctttttttttttttttttcctactgcacagtatggtctccccggaaacctcaataaaaaaatgagggtgggagaaaaacaactagaatcctaaagccccttcctgacgatcactttgaagaactgcaggagtaggggctaccctgtgtctgaacccgtcccagcgcctgagtctcagcgcaatcgggaggtttcgcagcggggcaggggaagggcccggagccaccgccatcgcagcccgggggaacgacggactcggggaagcccggcctggcccttcaagtcccgggcccagcaaaggccagcaccctccctccctccctccctgcaatcggtccccaaacattcgcggggcgcccactctggtaggcactaaggaaagcgccgaaacccgactggagcagagttcctgccccaggcagggaacaccgcgccatacactgagtctcacccacctagcaccatgcctgcagtggccctggtcacctccaaggacacagactgcaacaccgacgccgtcttatgactccaacgtgcaccggcggtttccgcgattccggcgttgcatcagagagcgtagatctgagggcgcctgcgagaatcggccgagcgccgcggttccattggttacgagaggtgggcgagcggcgccggggccgccatctttggtgagggcagaggcaacttccggatccagagacgccccgccccacgcgtttgtgcagctcggaaggcgctgcctgtcccggagctccgcggccctggagaccctggcacagtgtcacttttgcacccttccttccccgcctccccaactttcctttctgaatcttccaattccgccccagctggaggcgtgcgggtcctcttgcaaaccagaccaaggatgtcgccccgatccccagatggtggaggctggttgagttcatgtcaccagcaaacaccgcgccagctgcgagacggggtgcgcggcggtggaggggacgcagcgggttgcgtaaacttccttttttttttttttttttttgagacggagtctcgctctgtcacccaggctggagtgcagtggcgcgatctcggctcaccgcaccctccacctcccgggttcaagcgattcttctgcctcagcctcccgagtagctgggattacaggcctgtgccaccatgcccagctaatttttgtatttttagtaaagacggggtttcaccatcttagtcaagctggtctcgaactcctgaccttgtgatccgcccacctcggcctcccaaagtgctgggattacaggcgtgagccatcgcgcccggccagatgcgttaactttctaaactccgtgagccagcgtccctcggtgttcaggagaggagctatggtatatgttcatttaaaattgtaaggattaccgttaggaaggccataataatgtggtggaaagaacgagggcttcggaatacaaacctgggttctgccttttactaaccgtgtgtcttcagataaattacctaaactgaatgagcttcattcagcgagttgggaccgattgcagggagggagggagggtcctggcccttgctgggcccgggacttgaagggccaggccgggcttccccgagtccgttgttccccgggctgcgatggcggtggctccggcccctgcccctgccccgctgcgaaacatcccgattgcgccgagagtcaggcgctgagaggggtttatctgtgtcttcagataaattacctaatctgaatgagcttcagtttttctatttgtgaaagatgatataaattcactgcccgggcatgtaagaggtgctaataaagggtctgtcatcattttcaacttttttttacttttttggtgggctttttttttttttggagactgggtcttctctgttgctcaggctggagtgcagtggtgctatcatagctcacggcagcctcgaactcctgggctcaagtgagcctcccacttaagcctcccaagtagctgggactataggtgcacgccaccacgcctggcttattttatttttatttttgtggagatgggggaggggtctccctgtgtcgcccaggctggtctccaacttctgggatcaagtgatcctcctgcctcagcctcccaaagtgctggtcttacaggcgtgagctaccacgcccagcccattctcaatttagtggaataccagagtttgtccctgaagcaaaagaaaaccttttttttatgagaggtcctcaaaaaaataactctatatataggttcagggcccatcaagaatatgaaccaagtccgggcacagtggctcatgattgttatcaatcccagcaccttgggaggttgaggcgggtggatcacttgaggtcaggagttggagaccagtctggccaacatggtgaaaccccgtgtctactcaaaatacaaaaattagccgggcgtggtggcacgcgccagtaatcccggttactcaggaggctgaggcaagaaaatcacttgaacccaggaggcggaggttgcagtgagctgagatcgtgccactgcactccagtctgggtaacagagtgagactccatctcaaaaaaaaaaaaaaaaaaaagtaccaaatactattcctaaggaatatttcacccaattttatgaactttcccttttcctcttggctgaatgttttctgttggctcatggattagtatcaattgctacaaagcaaattttcccaaaccttagcagcttaaaaccccgaacatttattaccttagcagtttcttttgagacagtctcagttctgtcgcccaggctggagtgcagtggcgcgatctcagctcactgcaacctccgcctaccagattcaagagattctcctgcctcagcctcccgaggagctgggattacagacgtgtgccactacgcccagctaatttttgtattttgagtagacatgaggtttcaccatgttgtccaggctggtcttgaactcctgacctcaagtgatctgcttgcctcggcctcccaaaatgctgggattacaggcctgagccaccatgccaggccctaccttgcacagtttctgatggtcaggaataaggtagtgggttagctggaggttctggctcaggtctctcatgaatcatgctgagggcagggtctgtagtcatccgaaggcttgggtgggtggggatctgcctccaggctcactcacaagctgtggtcagaaaacctttccttgccaggtgggctcccgatagagctgctaatgacagccgctgacttcacctaaagcaagtgatcagagagagagaatattagttaccttttattttataataaattaccccaaaacatcaaatggcatttgttatctcacatttctgtggaataggtatctgggcacggtttagctgaggactcagagctgagtccttccagaggctgcagtcagcttaagttgagattcttaagtctcacctggagtggatccccttccacacacactcaggtgggtgttggccagaggtctccctcaattctttccacacgggcctcttgcttggctaaagccagcaaccaagatggaagttagaacctttagttgcctaatctcacaagggatatatcccaatacttttgccatattcgattaattaggatcaagtcacttggtccagcatacactcaaaggaagggtattacacactggcatggatgccagcagctgggaatcatgggccatcttagaaagctccccactgcagtgaccaaaactgaggctgcagtgccttttctaacctgacttgttaggtgaaatgtcattgtctctgccatattctactggtcacacagaccagccctggaggtgaatgccaggaggtgttgctcactgggtaccatcttagaggctgcccaccatagcctgtccagatgaatttctccacttcatcctgctccgccccagaggctgactcatgtgaaccacatcaatgggctccctcgttctctgactcctggtcagctgcagccaatggggaacacttgtggaagaacagaggtgggatgtgaggttggggtccttattcccgtagctcctcattgtaggctggctgcatcctcacttgagggccaccgctcctgccaggtggcactgagagattcatctgaactgcccttggtgaatttagtttcatctgatcgttaaaactgaatttactggccaggcacggtggctcacctttgtaatcccagcactttgggaggctgaggcgggcagatcacttgaggccaggagttcgagaccagcctaggcaacatggcaaaaccccgtctctattaaaaatacaaaaattatctgggtgtggtggcatgctcctgtaatctagctactcaggaagctgaggcaggagagttgcttgaacctgggaggtggaagttccagtgagccaagatcaggccactgcattccagccttggtgacagagtgagattctgtctcaaagaaaaaaaaaaaaaaagtgaatttacaaagcaacattctgttgtgaaataaaaagtgtacataggactgtgcaagcaggttgtacaagagggtcatttaaattcctacccccgcctcagtctacacctatagactcataggatttctctatgtcaagttagtgcaggatggaaaaaatgggcctagtgttgacatctgcataatatgctggcacatgccagatatgaacagccattctactctagccttacttaggagaaaccctaaaaagacagtggggagggtgggcaaggtggctcacacctgtgatcccagcactttgggaggccgaggcgggctgatcacctgaggtcaggagtttgagaccagcctggccaacatggcgaaaccccatctttactaaaagtacaaaaattagctgggcatggtggcaggcgcctgtaatcccagctactcagggggctgaagcaggagaatcgcttgaacccgggaggcggaggttgtagtgagcctagatcacgccagtgcattccagcctgggcgacaagaaggagactccgtcacaaaaaaaaaaaaagaaagaaagaaaagaaaaagaaaaaaagaaaaaaaagaaaaaaaaagaagtggtgaagggaagtcatctcagatggtggaactctgagcactgtgcctggttttccacttctcagctaagtagggatggcctgaaggaccaggctggcaatagtggctcacgcctgtaatcccagcactttgggaggcctaggcaagtggatcacctgaggttggaagttcaagaccagcctgaccaacgaggagaaactccgtctctactaataatacaaaaattagctgggtgtggtggggcatacctgtaatcccagctactcaggaggctgaggcacaagaatcgcttgaacctgggaggcagaggttgcagtgagccaagattgcaccattgcactccggcctacacaacaagagcaaaactccatctcaaaaaaaaaaacaaaaaacaaacaaaaaaaggactgatggacactggctcacgggttggccagttgatcagggactaagaaagaacaagattaaagattaggtacaggaggtctgctggggatgtggatggacctttttgaatgggcactgaatgtgaagacttcttgtcctctgcaaacatctatcagaaggcatttggtatggaggaggtctctgtcatctctggatgttggacttttcctcccaaaacatctcagttcttgctcaaagagcccatatgtgaagtggctatagtaacaggatagaggctatgcatgtgttcaacctcataaactgcccttcatcctggctgatcttgctggccactgtcactgttaagtacccaacctgccaacagcagaagccaactttgagaaactgacaggacacgattcttttttttccttttttctctattcttctcttttttttttttttttttttttgagacggagtcttgctctgttgcccagggtggagtgcagtggcgtgatcttggctcactgcaacctctgcctcctgtgttcaagcaattctcctgcctcagcctcctgagtagctgggactataggcgcccaccaccacacccagctaatatttgtacttttagtagagacaggatttcaccatattggccaggctggtctctaattcctgaccttgtgatccccccacctcggcctcccaaagtgctgggattatagacgtgagccaccgcacctggccaggacacgattctttagggagaccagctggccacttgacggcaagtaaattagatcagactcctggaggaggcagtaatatgcctcccaggtatagactcagtccacacagggatgcgccttctctgcctgcagcacccacatctatggacttacagaacgctgcatgtgtctttatggtattcagcatctctcaccccaggacacattttcagtaaaggaagtgtgacagtgagctcatacctatggaattcagtggtctaaccatgttctttgtgttagattattatttaaaataatcagacatgcttctgtgaacccagaaaatcagagacaggtctcagttaatttagaaagtttattttgccaagattgaggatgcatccatgacaccgcctcaggaagtcctgacgacatgtgcccaaggtagtcgggcacagcttgcttgtatacattttagggagacacgagacatcaatcagtagaagaattacattggttaggtctgggaaggcaggacaatttgaagcaaaggcaggaagacttgaagcagggagggggtttccaggtcacagataagtgagacacaaatggttgcattcttttgagtttctgattaggctttccaaaggaggcaaataagatgtgcatctctctcagtgagcagagggataactttgaatagaatgagaggcaggtttgtcttaagcagtttccagcttgagttttccttcgtaaaaaggaaaatattttgggggtccaagatattttcctttcacactcccttctcccatacagaaggaatatacttccctgcttcatttctgctgggcttagccatgtgcatttactttggccataggatattggcaggtgtgatgcaagcaaaggtttacaatgtgtttgtgcagttggacttgtgttcttgcttctgccattgttagagaagccgaggcctaggagggccagagtgacaccattttaagttgagctccatcttgagactccttgccagtcacaacccatggtcataagatgtttacagttgagaaaacagcctaaagatacctgcaaggacacaatcctgtaacaacagaaagaccagatgtcccaatacccgtaatatatgctttcaagataattatagttatgctttaatgtacttatacactaaaatgtcaaggagagttttctttaaatcaataaaataataaattttgtcatgctgtcagaccacatgcacaaagacacagcttagtttagcctttacatagacaaaacccctatatatcaaatttttttttttttcagacagagtctcgctctgtctcccaggctggagtgcagtggcgcaatctcggctcactgcaagctccacctcccgggttcacccattctcctgcctcagcctcccaagtagctgggactacaggcgcccaccaccacagccggctaattttttgtatttttagtaaagatgggggtttcaccgtgttagctaggatggtctcgatctcctgaccttgtgatctgcccacctcggcttcccaaagtgctgggattaggcgtgagccaccgcgcccggcctatatatgaaaaatttaaaatggccaggcgcagtggcccagcactttgggaggcgaggcgggtggatcatcctgaggtcaggagtttgagaccagcctggccaacatgcgaagccctgtctctactaaaactacaaaaattcaccaggcgtggtggcgggcgcctgtaatcccagctactcaggaggctgaggcaggagaattgcttgaacccaggaggcagaggttgcagtgaaccgagattgtgccattgcactccagcctgggcaatagagcaagagtccatctcaaaaaaaaaaaaaaaagaaaaagctaaaacaaagacggggcattcctttgcttgcttcctaaggacgccctactctgtaatggaggcgctttcaataaactctcaccgtaccctgcaacttgtcttgaattctccttcctgcgtgtaattcaggaggcctctcttggggtctggatcaagaccgctttttctgtgaacaaccaccatgagaagaacacgccctgactgacccactggtccagggaagctgagacatggagaagacagggacccaatcttcagcttggagacacgtccagctgaactcagcccacatcagtgacctgcagatgcataagtgagaataaacgattgttgggttacgcctctgagtttgggaggcattttgttacacctctttagtgtggcaatagtagactaataatacatgctctattatgcagaagtgtgtggcttaaaataatagttgaatgaccaggtgcggtggctcaggcctgtaatctcaacattttgggaggccatggtgggaggatcacatgaggccaggagttcaagaccagcccgggcaacatagtgggacccccgtctccataaaatttttaaaaaattagcctggcgtggtgggcgcacgcctgtagtcccagctactcgggacggccagaatgaacggcattatcgtctgtctcttcattctgattctggccagcaaggggtggcctccccctgcggtccttgctgttaggtccctgcgccccctcagctttgcgctgaaggtcgctttaccggaccccacttcgccctaccaggcgcaggatgagcgtctctgttcttttaatgtggcgtcccccacaggccaccgtaccaggccgccggtccggggttagggcacttgacgccggcgccgccatgttgtctccgggccacttccgcgtttctggcgcgtggtcttgcatttcctacttggtcctgttcgtggcgccgcgcctccgggtgttggggagtccgggatgatggggaatccggggctcgccctagtcgcggggacaccgccttccaggagctgtccccaggcaaactcacagacatcttcaaagagccttcttggacattctgctttttgctcctcataacaggcttcggtaagagaacaggcaaacatcactgcgggcgcctctagggctcgtttccctgtcccagtaccgggaatcggggaggggtccaagcagagttcacttagttaacaaatcagtgaagcagttggaaaatctcagttatattttaaatgagatcgagggcggtgactcacgcctgtaatctcagcactttgggaggccgaagcggaggtggagggtcgcttgaggccaggagttcgagaccagcctgggcaacgtggtgagccacccccgcccccgcccctctataaaaaatacaagaattagccgggcttattggcatgggattgtggtcccagctacttaggaggctgaggtgggaggtcgcttgagccatggaggtcgaggctgcactgagctgtgatcacgccactgcactccagcctgaggctacggagagagaccctgtctctaattaataaataaattatagatagatgatagatagatgcaataaaaaataaaattggcttgtaaacggcaaactaaaagtggaaattatcattacaatgaaaatattaatttgaggaaccgaaaacttaactttccttttcctgtagttaagtttaagcacttagatttgcttcagtgattcccaggcttcatgattgcaagctgcttgcttgtaagcaccttgtctctcactaaaaaaaattacagttattttaaagtcccgctggatgctcattctttaaggagggtgaacaatggtaactcctgtaccgttagagctctgaatgaagccagatacgttccatagatcacagaactcattttctggcttggtgagcctggtcaagtttcttaacctttctgagccacagatgtttcaattataaagtgataataacccttcactgggaaggttattgtgaggataatatgagatcagctataccaaaatatgcctaacatgtacttgacatccagtaagctttctgaattaggatataaatggcattaatggttaatcattgttattcttttgttccatgatatgcatgaataacaacttgaagccttcaaactgctgagagctgcttggtggacctcgtctctcaatttgcccttcccactaaacctgtcttcccccaacagtgggctttctggtcagcatttcagaatgtctcaaaccgtaggtccttcccacagccccaaatctcagcaaatgaccagtctcttgcttcaagctattaaatggatgctgtctgacagccctcccttgaaacctgcaaactctcgtgctttggcatccatcctttccctctagtgcaatgcaagtcacatcctccctctggctaacctctccacccatcttctggattccccacacctctccaatctaatcttcacactccagccagggcgaacacttacaaatataaacacagtcatttcattctctatctagcaactttccatggacttccttttgctctcagggttcacctcaacatccttacaggctttccaggctgtgtatgctctggcttaccactgcttcttatttttttttttattatttatttatttatttatttattgattgatcattcttgggtgtttctcgcagagggggatttggcagggtcacaggacaatagtggagggaaggtcagcagataaacaagtgaacaaaggtctctggttttcctaggcagaggaccctgcggccttccgcagtgtttgtgtccctgggtacttgagattagggagtggtgatgactcttaacgagcatgctgccttcaagcgtctgtttaacaaagcacatcttgcaccgcccttaatccatttaaccctgagtggacacagcacatgtttcaggagagcacagggttgggggtaaggtcacagatcaacaggatcccaaggcagaagaatttttcttagtacagaacaaaatgaaaagtctcccatgtctacctctttctacacagacacggcaaccatccgatttctcaatcttttccccacctttcccccctttctattccacaaaaccgccattgtcatcatggcccgttctcaatgagctgttgggtacacctcccagacggggtggtggccgggcagaggggctcctcacttcccataggggcggccgggcagaggcgcccctcacctcccagacagggcggctggccgggcggagggctgacccccccacctccctcccggacggggcggctggccgggcagaggggctcctcacttcccagtaggggcggctgggcagaggcgcccctcacctcccggacggggtggctggccgggcagggggctgacccccccacctctctcccggacggggcggctggccgggcggggggctgacccccccacctccctcccggacggggcggctggccgggcagaggagctcctcactttccagtaggggcggccgggcagaggcgcccctcacctcccggatggggtggctggccgggcagggggctgacccccccacctccctcctggacggggtggctgccgggcggagacgctcctcacttcccagacggggtggctgccgggcggaggggctcctcacttcccagacggggtggctgcccggcggaggggctcctcacttctcagacggggcagctgctgggcagaggggctcctcacttctcagacagggcggttgccaggcagagggtctcctcacttctcagacggggcggccgggcagagatgctcctcacatcccggacggggcgacagggcagaggcgctccccacatctcagacgatgggcggccgggcagagacgctcctcacttcctagatgggatggcagccgggcagagacgctcctcactttccagactgggcagccaggcagaggggctcctcacatcccagacgatgggcggccaggcagagacgctcctcgcttcccagacggggtggcggccgggcagaggctgcaatctcggcactttgggaggccaaggcaggctgctgggaggtggaggttgtagcgagccgagatcacgccactgcactccagcctgggcaccattgagcactgagtgaaggagactccgtctgcaatcccggcacctcgggaggccgaggctggcggatcactcgcggtcaggagctggagaccagcccggccaacacagcgaaaccccgtctccacccaaaaaatacgaaaaccagtcaggcgtggcggcgcgcgcctgcaattgcaggcactcggcaggctgaggcaggagaatcaggcagggaggttgcagtgagccgagatagcagcagtacagtccagcttcggctcggcatcagagggagaccgtggaaagaggggagagggagagagagggagagggagagggagagctgcttcttatttttatttattttatttatttattattattatttttttgagacggagttttgctcttgttgcccaggctggagtgcaatggagcgatctcagctcaccgcaacctccgcctcctagcttcaagtgattctcctgcctcagtctcccaagtagctgggactacaggcatgcgccaccgtgcccagcttattttgtatttttagtagagacggggcttctccatgttggtcaggctggtcttgaactctcgacctcaggtgatctgcctgcctcggcttcccaaagtgctgggattacaggcgtgaaccaccacgcccgactattttttatttgttcttttgagacaggggtgatcctcccacctcagcctcaaaagtagctgggacttcaggcacacaccatcacacctggctaatttttttttttttttttttttgtagagacggggtttgggggttttgccttgttgcccaggttggtctcgaactcctgggctcaagggatatgcccaccttaacctctcaaagtgttaggattacaggtgtgagccactgcgcccagccctattgctttttaaaggtacaattaactttagcccaggctagctttttcactgaattgatctgggtacgatgtggggtttgggatagctgttcagaaaggtgaagacagagtcaaagagagaaaaacattttctctatagaggtggggaaactttcagagagaattaattgtgtcctctaaaagcaatgaagtccgcttggttagtttgaagaacgatcatgtatcagtttataggaattgagacttttttttttttttttgagatgaagtctttctctgtcccccaggctggggtgcaatggcatgatctcagctcactgcaccctccacctcccaggttcaagcaattctcctgtctcagcctcccaagtacctgggattacaggcgcctgccaccacgtctggctaatttttgtatttttagtagagatggggtttcaccatgttggacaggctggtcttgaactcctgacctcaagtgatccgcctgcattggtcccacaaagtgctggggttacaggcgtgagccaccatgcccggccggagttgaggctccaaggggtctcggggggtctcagaagctcagctgatgatatcttaatcaggtttgggtttttttttttttctgttagaacaggtcataaaaatactttcaccccaagccacaaaatcctataaaatagctcagtctttgacaaatacagtgaatataaaagagctcttttgagtttctatttactcaagatgtttgcagtgataaaatcttgatataagttttctagaatcttgaactttcaaagctcctttagaaacagtcctttgtgttgtttttattaaactcttcaatgaacacaaagtttttatgttgttcacacaaaatttaaataaggaagctgaaggtaggtgggaacccccaaatggatggtaatagaaaacctcctatagcatttccatagactggtttattcattatgcagcttggctcagcagaaccattttataatgaaactgcaagatgactcccagtgggcaaatcaacctctattctaaaggttgattcttgtcaactgggagaattgattcctgatgagaaatgctagactaaaaaaccctcccacattcacttcacaagccagatccaatatctttaatcctcttatggaaaagaaacaaggagacatttcagggcttacaacagccttccagaataattgcaacagtctcacagcatcaggggccaaaggaatattgacatctttccaactggaaatcctaaaccggttatctggagtgagacaatctatgtcttaaacttggccagagcaccttggattttttttttttttttttttttttttttttttttgacggagtcttgctctgtcccccaggctggagggcagtgatgtgattttggctcactgcaacctccgcctcctgggttcaagcgattctcctgcctcagcctccccgtagctgggactacaggcatgcgccaccatgcctgggtaatatttttgtacttttagtagagacagggtttcaccatgttgatcaggctggtctccaactcctgacctcaaatgatccacccacctcagcctctcagcgtgctgggattacaggcgtgagccaccgcgccaggccagcaccttggattttaaccaccatcctagatcaggaagtttaaatttctctccatgttaaaattttcctttctcatattgttaatacattactatttgattaatacaaattactatttgttaatacaaatacatgctatttgattcaggttttgaagcaaaattcctgataattttaaaactatgagagttatttctttctatgcatcttattgctgaggtcatcttagctgatcattaattggacaatatagtggtaaatccatactggtctttgactctgaaaacattctttcaaattccattggtgctttccactgttttgacacgactttaagatgttatccagactcttctgagcgcaaagaatatgtgtctgcatataaatggcctaacaaaacacaccactctgtctatagccatgaacaggaagtccccatctctgggcactgccagtcacccaagaggacaatgtgaagagctggggttgctgctctagggagaagcttgtgggcttgggcgagtttcagtttgggagtctttgtgacttaagcaggaaaaatattaactcagattactccctttggcctaaaaatcatttctattttttattgtttaatttttgaaatagaaaatgtattcatatggttcaatatttttaaagtatgaaaagataattcaatatttaaaagtctcactcctcataacaactgtagtctctttttttttttttttgagacggagcctcactgtgtcacccaggctggagtgcagtggcgtgatctcggctcactgcaacctctgcctcccgggttcaagtgattctctgcctcagcctcccgagtagctgggattgcaggcatctgccaccacgtccggctaatttttatatttttagtagagacggggtttcaccatgttggccaggctggtctcgaactcctgacctcgtgatccacccgcctcagcctcccaaagtactgggattacaggcgtgagccaccgcgcctgccctactagtctcttttatatctagagattcttgttgaaaatatgactatattcctctaaatctacctcctttattccttcccttaaaacggcctttttttttttttttaggcataaataatatacaacagcctgggcactgtggctcatgcctgtaatcccagcactttggaaggctgaggtgggcagatcgcctaaggtcaggagttcaagaccagcctggccaacacggtaaaaccccatctctactgaaaatacgaaaattagctgggcatggtggcgcatgcctgtaatcctagctactcaggaggctgaggcaggagaatctcttgaacctgggaggcagaggttgcagtgagccaagattgtgcccctgcactccagcctgggcaacagagaccgcatctcaaaaggaaaaaaatatatatgacaaagtgtacacatttaaaatgtgcaatttgatatgttttaacatatgtgtatacctgtgaaaccatcaccacaattggggttagggaaaaaatccatcaccccaaaaagttttcttttttttttttgagacagagtcttgctctgttgcccaggctggagtgcagtggcctgatcttggctcactgcaagctccgcttcccaggttcatgccattctcctgcctcagcctcccgattagctaggactacaggcacccaccaccatgctcggctaattttttgtatttttagtagagacggggtttcatcgtgttagccagatggtctcgatctcctgacctcgtgatccaccggcctcagcctcccaaagtgctaggattacaggcgtgagccaccgcgcctggcctaccaaaaagttttctcatgtatttccctagtgactaatgatgttgagcatcttctcatgtgcatttttgctttacctgtatcttctctgttgaagtatctgttcagatcttttgtgaggacaaggtacggggttccaggtagggatccaagttcattttttcgcatgtggatatcaaatgtcccggcaccatttattgagatggccatcctttctctacctcatcgcttttgtaaccttgttcaatatcagttgtccattgatgtatggatttatttatggactctattaggttccattgatctatctgccctctttaagccaatactatgctgttttgattgctatagctttataacaattttctcttttttggccctaatttcacatttattttatttttaaaattttgacttttattatagactaaagggtatatgtgcagctttgttgcatgggtaaatcgcatgactctgaggcttgaggtcccagcgatcctgtcccccaggcagtcagcatagtacttaactagtcgttcttcagcccatgctggtaacaactttcaaaatcaagtagtgttcttcctccaactttgtttttcttctgcagagttattttggctattttaggtcctttgcatttccagatgaattttagaatcagcttatcaatttttaccaaaaaaagaatctcatgggatttcaattggaattgcattgactctacacatcaatttaattgcctcctcttgtttcttttttatatgaaaggttgtccccatacacacagttctgcacctggctcttcacactccacaatgaatggagatctttcattcttctcccttagctcccattatagtttcattgtatccttttgttgggatggaacttatttcatttaactgtagtgaaactgatggattgctagcttactgctgatattttgctattacaaacagtgctgcagtataatcactgtacgtgtcatttcccttgtgggcaaatatatctgcaggatgaatttgagaagtgtgattgccaggtcaaagggaatatacatttaacattttactggcaagggccaggtgcggtggctcacgcctgtaatcccagcattttgggaggctgaggcgagcggatcacaaggtcaggagattgagaccatcctggctaacacggtgaaaccccatctctactaaaaaaatatacaaaaaattagccgagtgtggtggcacccgcctgtagtcccagctactcgggaggctgaggcaggagaatagcttgaacctggggggcagaggttgcagtgagctgagactgcgccactgcactccagcctaggtgacagagctaaactccatctcaaaaaaaaaaaattaatggttatggctaaatcctttcctagagtttcataatttatatacttttcattaatacattagaaggcttgttttgccatagccttaacagtgcattaccaaactttcttgtttttgccaaattaataggtgaagatggcctatcaaaatcattttgattttcacttctttatttcaggtaagtttaaacattgtttcatgtgttgaagagccatttgtatttctttcttttttttttttttttttttgagatggagtctcgctctgttgcctgggctggagtgtagtggcgcaatctcagctcactgcaagctccgccttccgggttcacgcgattctcctgcctcagcctcccgagtagctgggactacaggcacccgccaccacaccttgacagggtttcaccgtgttagccaggatggtctcgatttcctgacctcgtgatccgcctgcctcagcctcccaaagtgctgggattacaggcgtgagccaccgcgcccagctgtatttctttttttgagacagagtctggctctgtttcccaggctggagtgcagtggtgcaatctcaaatcactgcaacctccgcctcctaggttcaagtgattctcctgcctcagcctccctcgtagctggcactatagttatacacccagctaatttttgtatttttaatggagacagggtttcaccatgttggcctggctggtctcaaactcctggcctcaagtgatacgcccaccctggccttccaaagtgctgggattacagggatgagccaccgcaccccgccccattgtatttccttttttctgactttttgttttcacaaccttggctgctatggtctgaaggtttgtgcccccttaaaattcatatgctgaaatcctaacctccaaggtgatactaggaggtggagacattcagaggtgattaaatcaggagggattatgtctttataaaatagtcctgaaggagcttgttggccccttccaccacgtaaagacacagtcagaaggcaccatttgtgaaccagaaagcatttcctcagtaggcaccaaatctgtcagccccttgacctaagagttcctagcttctgccagaactgtgagaaaaaatttctgttgcttatataaaccacgcagtttgtggtattttgtcatagcagcctgaactaagactcgcacactttttctccattttgccatctttgcttataccttttttctttttcttttttttttttttgccataatggaggttttaaaaatatttatgcatttgaaattactagcctttcctttgaggctttagatttttagtcttaattagaaagtctttccccactccagtatttgaatttcctcgtgattttcttcaaatactttgatgagtttttttttcttttacattgaaatctcttcattatttggagcctattctactacagtgcatgatatctaatttgtttccctgttgtctcaacaccagtccatctttccccccacccacctttgatgccactttatatagtaaatgttcacgtgtttgaggctatttctggatttttctgttctgttccatggaatgtctgtgtaatcatgcatcagaaccacactactgaaactgtttttcaaattataatatggcgtaatatctggtaggagtggtctcacctcattgcttagttttctgacattaatttttccatatgaactttagaatcagcccattacaggaaactgtttgcatttttatgaggattatatgccatttttaagttattgtaggaagaatcaaccctttctagtgtgatttttttttctttttttctttgagacagagtctcactttgtcacccaggctggagtgcagtgatgcaatctcagtttaccacaacctctgcctcctggattcaaatgattctcctgcctcagcctcccgagtagctgggatgacaggtgcatgccaccacgcatggctaatttttgtatttttagtagagatggggtttcaccatgttggccagtctagtctccaactcctgacctccggtgatccgcctgcctcagcctcccatagtgctgggattacaggattacacggtggtgcccggcctcagttttgacgactttccctgatgactaatgatgttgagcatctgttcatatgcttattgaccatttatatcttttttttttttttagatggagtttctctcttattttccaggctgcagtacagtggcgtgatctcggctcactgcaacctccacctcccaggttcaagcgattctcctgtcttagcctcacgagtagccgggattacaggcacatgcccccattcccagctaatttttgtatttttagtagtgacggggtttcatcatattggtcaggctggtctcaaactcctgacctcaggtgatccgcctcggcctcccaaagtgttgggattacaggcgtgagccacccactgtatctcttgttcggaggaatatctaatcaagaaaatcatttttactgtttttattttttggtttgttcgtttttttcctgtgagatggagtttcactcttgttgcccatcctggtgtacaatggcgcgatctcggctcacttcaacctccgcctcccagtgcgtccggaattggtgggttcttggtctcactgacttcaagaatgaagctgcgcaccctcacggtgagtgttacagttcttaaaggcggcgtgtccggagtttgttccttctgatgttcagatgcgttcggagtttcttccttctggtgggttcatggtctcgctggcttcaggagtgaagctgcagaccttcgtggtgagtgttacagctgttaaggtggcgcgtctggagttgttcgttccttccggtgggttcgtggtctcgctagcttcaggagtgaagcttcagaccttcacggtgagtgttacagccgttaaggtggcgcgtgtggagttgttcgttccttccggtgggttcgtggtctcgctagcttcaggagtgaagcttcagaccttcacggtgagtgttacagccgttaaggtggcgcgtgtggagttgttcgttccttccggtgggttcgtggtctcgctagcttcaggagtgaagcttcagaccttcacggtgagtgttacagccgttaaggtggcgcgtgtggagttgttcgttccttccggtgggttcgtggtctcgctagcttcaggagtgaagcttcagaccttcacggtgagtgttacagccgttaaggtggcgcgtctgcagttgttcgttccttccggtgggttcgtggtctcgctagcttcaggagtgaagcttcagaccttcacggtgagtgttacagccgtgaaggtggcgcgtgtggagttgttcgttccttctggtgggttcgtggtctcgctagcttcaggagtgaagcttcagaccttcacggtgagtgttacagccgttaacgtggcgcgtctggagttgttcgttccttctggtgggtttgtggtctcgctagcttcaggagtgaagcttcagaccttcacggtgagtgttacagctcatagaggcagtgtggacccaaagagtgagcagtgacaagatttattgcaaagatgaaagaacaaagctcccacagtgtggaaggggaccccagtggattgcctccgctggctcgggcagcctgcttttattctcttatctggccccacccacatcctgctgattggtccattttacagagagctgattggtccattttacagagagctgattggtctgttttgacagggtgctgattggtgcgtttacaatccctgagctagacacaaaagttctccacatccccactagattagctagatacagagcgtctacacaaaggttctccaagtccccaccagagtagctagatatagagtgtcgattggtgcattcacaaaccctgagctagacacagggtgctgattggtgtgtttacaaaccttaagctagatacagggtgccgattggtgtatttacaatccgttagctagacataaaggttctccaagtccccaccagagtagccagatagagtgtggattggtgcattcacaaaccctgagctagacacagggtgctgattggtgtgtttacaaaccttgagctagatacagagcgctgattggtgtatttacaatcccttagctagacataaaggttctccaagtccccactagactcaggagcccagctggcttcacccagtggatcctgcaccagggccgcaggtggagctgcctgccagtcccgcaccctgcacctgcactcctcagcccttgggtggtcgatgggactgggcgctgtggagcagggggtggtgctggtcagggaggcttgggcctcgcaggagcccaccgtgtgggggaggctcaggcatggcaggctgcaggtcccgagccctgccccgcggggaggcagctaaggcccagggagaagtcaagcatagcagctgctggcccaggtgctaagcccctcactgcccgggctggcggggcccactggctgctggagcgtggggcccgcggacacccacgcctacccagaactcacgctggcccgcaagcaccgcgtgcagcccgggttcccgaccacgcctctccctccacaccttcccgcaagctgagggagccggctccggccttggccagcccagaaaggggctcccacagtgcagcggtgggctgaagggctcctcaagcaccgccagagtaggcgccaaggccgaggaggcgccgagagcgatcgagggctgtgagggctgccagcacgctgtcacctctcaccgggttcaagcgattctcctgcctcagcctccccagtagctggaattacagacgtgcgccaccacactccgctaatttttatttttagtagagacggatttctccatgttggtcaggctggtcttgaactcccggcctcaggtgatctgcccgcctgggcctcccaaagtgctgggattacaggtatgagccactgcacccagcctttactgtattttttagcagaaagaaaatgattgcattacagtggttatttttaagggccccaacctccactttgtcctgagatctacgttgtgttgttttcagtgttttaacaggcctttttatttttataaatgccccagaagttgtagcgcagccctaactttctagcaggacttttagaagctgacaattttcctaagtttcattcacatcacatgaaggcagcaattgttaaaatatatttagattccattagggtacattttgctatcacattgaagtctctcaagaatcattttattcccatcagatgttgttactgagcagtttctagtgctgaacatgactaagaacctttaggtggtgctctttgattaaaaacatttatccctcaaacaacttaaatacagtagtatattgcaggaaaaagtgacctttatttttttagggatgatctcccaggtctgctcaatttttctgccatttctattgcagaggctaataatttgcccatctcctcccagcccaagcaccccaagactgatacttttctatcacctgctgctaattttgcctcccaaagagtctcccatctcgacgcagagagaaccttcttagtggggtcacagcttcccttgcgtccaagagctgtctgtcccacagcctggtcagactcccacagcctcgtcagactcccacagcctcaaaccccaggtttgccactcacttcctcactcactcctctttgctcatttttctgccaacgattcgtcatgtatttctaggactatctgctcacttctcaccccttactttttttgttttgttttttgagacggagtctcgctgtcacccaggctggagtgcagtgtcacaatctcagcccgctgcaacctccacctcccaggttcaagtgattctcctgcctcagcttcccaagtagctaggattacaggtgtgcaccaccatgcctggctgcttttttttattcttagtagagatggggtttcaccatgttggccatgctggtctcgaactcctaacctcaggtgacccaccaccttggcctcccaaagtgctgggattacaggtacaagccaccgtgcccagccccagtccttacttttggttgagggttacctttcctttcattctggctaaagagttgaggtcagttggaaaaacccagactcaatcttccttttttttttttttttttttggagagagtctcactccattgcccaggctggagaacagtagcacaatcatggctcactgcaacctctgcttcctgggttccagcaattctcctgcctcagctgccagagtagctgggattacaggtgtgcaccacctcacccggctaatttttgtatttttagtagagacggggtttcgccatgttggccagactggtctcaaactcctggcctcaagtgacccgcccacctcagcctcctaaagtgctgggattataggcatgagccaccatgcctggctgatctccctaactctaaatctttacccctctgtctctaaagtctggccacctttttaattcttttagagacagagtcttgctctcacccaggcttcagtacagtggcataatcgtagctcactgcagcctcaaactcctgggctcaagtgatcctcccacctaagcctcccaagcagcagggactacaggcacatgccactacactgagatgtttttttttgaaaagacagagtcttgctatgttgcccaggctggtctcaaactcctggcctcaagtgattctcctgcctcagccttccaaagtactgggattacaggcgtgagccacagtgcccggtcctgatcaccttttctccatcaccttttccctaacacttagtttccctttctccatcacttcttccctaacacttagtttccctgtccccgactttctcactactaaaggacccctacattcctctagaaaccttgtgggactagattcttctgtcacataccctattcttaaaaataacaacaacaacaaaagccaatttaaatactttagaagatcatacttttcaaagattttactaaatcatttttttaaacaaaatatacattaaatctcagatttacagaatatagaaataatttatccaaagaaatttgcatttaaaattgttaatattgcacccaacagtatgtctttgacacatttgcattgtcaatctttcccacaatttgcaaaaacaggagagaaatctgaaactaacagaattacacaagctaagttttctgtaaaaaaagaaaaaacttacaattttttatttacaagttaaggaaaagttgtaaacgttcaggattttacttccacagaataaaaagccatacattcttttatcatacctagaaaatgaacatatacacattgtgattacctcataggaattcaacaggactgatattgtgaacattcacagcccaatggtaaaaaacagaattctcgaactatggaaactagtgtgtgaaagacacagaatgagaaaaatgtctggaaaaaaattactttctcctctttgaggagtttccataattacctaaagttatcttcaaatttaaaaggacacaccattccccagtcttaggaatgtggctgccaataaccttttctctcgacataagacaagtgaaaaagagtgaggtctttgttcaagtccctgataaaatactttgcatataggcaggcacaaaagtttgctttccaaaagaaagctttgcaaaatattctgcaatttattactgatatcctcagtttttaaaaaccccctttttaagcccataaatatttatatgctttaaaaaatgagagtagggaatcaaatcatttggtactatgggaagctgctaaaataatatttgatagtaaaagtatgtaatgtgctatctcacctagtagtaaactaaaaataaactgaaactttatggaatctgaagttattttccttgattaaatagaattaataaaccaatatgaggaaacatgaaaccatgcaatctactatcaactttgaaaaagtgattgaacgaaccacttagctttcagatgatgaacactgataagtcatttgtcattactataaattttaaaatctgttaataagatggcctatagggaggaaaaaggggcctctgggaaattatgctgaagatcaccgaaaggaaaatgtaactgtaattttataatacaataccatttgaactgaaatacaacatgctttgtaattctattgccctggattgagactggattaaaacgttccctttcaaccataatgtacataaccagttgaataataggacttttattattattaaaaaattttttttgagctggtgtctcactctgttgctcaggttggagtgcagtgccacgatctcggctcactggaacctccacctcccaggttcaagcgatttccagctaatttttgtatttttagtagagatggggtttcaccatgttggccgggctggtctcctgacctcaagtgatccacctgccttggcctcccaaagtgctaggatgacaggcatgagccaccatgcccggcctatttttaaatttttcttaagacagagtcttgctctgtcacccaggctggagtgcagtggcgcaatctcggctcactgtaacctccatctcccaggttcaagcgattcttctgcttcagcttctcaaataggtgggattacgggtgcccaccaccaagcccggctaatttttaatttatggtagagacagggtttcaccatgttggctgggctggtctcgaactcctggcctcaggtgatctcccctcctcagcctcctaaagtgctgggattacagacctgagccaccacgcccggccgaataataggacttttaaaagtcctatttcttggctctgctattgtttaatagtccaacccaaggagtttgttataaagattatttattgtcttcaatatctttgtgatgaatgcaattcacacacacacacaaagtcctgagagtctttcataaaaaaatagacgtgctttgtggccgcatcccagcctgggggtaagggatcagctgtccccggtgcgcctgtactccgcggtgccatccgccacgatggcatcaagcggcgagcgcttcttgcggatgctgcgcccggaggagatgaggtccgcgtagccccgctggtgcgagaaggcgtaggccgagcgccgcgttgacacgccccggcggaacacctgctgccgtcgctgccactgctcctccgccttcaaccgcttgcgatgcttctggatctgcaagggggagagatggggagggatgaaaataagatccacaccagggaggaggcctggccagacggttgacagaaatgaacactgatgaactcccctgacacctgccccattttgatgcaggcagttctgtccccacttgtgtgtgtgtgtgtgtgtgtgtgtgtgtgtgtgtatgtgtgtctatatctttttttttgtttttgagacagtctcgctctgtcacccagacttgagtgcaatggcacgatcttggctcactgcaacctctgcctcccaggttcaagcgatcctcctgcctcagcctcctgagtaactggggttacaggcacgcactgccacacccgtctaatttttgtatttttagtggagacagaatttcaccatgttggccaggctggtcctgacctcaagtgatctgcctgcctcggcctccaaaagttctgggattacaggcatgaaccacagtgcttggctatatctatctatctatctatctatctatctatatcgacatatatatatgatgatataaatctatatccatctctctatatctatacatagattgattgatcaatcgatctacctacctacctacctggagatatatattgaagccaagggaaggttatttaacttttccaaggtcacacagctagaaaatgcaaagccaagattcccactcctctgaagctagtgcccttttctagttcagaccagatgggtacagtcaaagagaaaattcagtagggcctctttcctgggttgttactgcatactgttggcactgcaaaagggagacccgagggatactgaaggttgcctcagtagcctctactctctccttctttctaatggaaattgattgtattcagattgccccccccaacccctcacagccacatttctcatgggcggtgggcaggttgatttcccttgctaaactagtccagaatgggcaagtgacctaattttggcacgtgagacctgagggcactgtactggggcccttgggtgagaagttccacggcccctaaggagctacagaataggctcttatctccccccgacactgataggtcaggaagtgatacccagaactgctctggccatcttccagcatccatatgaagctaataatgaaggtttctgagagaagagatggcaagaaccagcccaatcctttcttgacaacattaaattgctcaatcaactgggcctgaagcctactaatgattaatgatgacgcactactgtagagatgttttgagtcacagctttctgttccttgtagctcaaaggatcctgctacagaaggtgacatttttcttaaataaagaaaaaaaacccaatctgatttgtatgacaaaatgttaatactgtaattgttaaactgaggagatagatatatggggctcattctgttctcccttttttgtttatgtttggtaatttttgtattaaaaagcaagcacactaaactcccaattccaaaagacttatttgtgagatagagttaaagagaagcaatcatgaaaaatcattcttaccaaacttcccatgagcttagaattttgcaggaaacgtgctgttgggaaacgctttggtttctgtgagggacagagttgggaaaggactatattctttataccttatcactttctgatggccagatggtcattgacaggaatcgaatggcaacgacgggtagtaagcacacagcaacagccaggatgatagttaaccaaatgtatggctgtctcagagcgtttgaagctgtgcctgtaaagaacatggcaaatgcatcactgtggttcttttttcctaagaacatagttaatatttcgccaggtgtggtggctcatgcctgtaatcctaacactttgagaggccaaggtgggtggattgccagagctcaggagttcgagaccagcctgggcaacatggtgaaaccccgtctctactaaaatacaaaaaatcagccgggcatggtggtgtgcacctgtagtcccagctactcaggagacagcagaattgcttgaacccggaaggcggaagttgcagtgagccgaaattgtgccaccgcactccagcctgggtgataaagcaaaactctgtctcaaaaataaaaaataaaataaaaaaaagaacatagttaatatttcataatctataaatagatcatttatggtaaagttttacaactggattggcctccccaaaatatccattatggctcaaagaacagacattttaaaatcagactaagcaaagcaaaattgggaaggtaaattatttgaaacaaggcaaatttacataagtgagcaaataaggaaaaaaagcacatttgttgacattgcattgattaaaaatgcaaagttaggtgatcaagacttctgacttttttttgagatagggtctcactctgttacccacgttggagtgcagtggcgtgatcatggctcactgcagcctcaacctcctgggctcaggtgtcctcctaccttagcctcctgaatagctgggactacaggtgtgcgccaccacgcttggctaatttttgtattttttgtagagatggggtttcaccatgttgcccaggctggtctcaaactcctgagctcaagtgatccacccatattggcctcccaaagtgctgggattacaggcgtgagctaccacatctagccccagtattaggttttatgggaaagaaagaataggcttttatccagccttttaagtcttaagttatctaattcaacacacgtacagcgctattgtaaagctattttaatttgtcttcctcccatcatgttatgccctttcaacccaccatcaccatttaatttccagacaagacattaattttcactagcaataataatttgtatatatttgttttgttgtgctttgttttttttgttttttttttgagacagggtcccgctctgtcacctgggctagagtacagcagtgccatcacgactcactgtagcctcaacgtcccaggtcaagcaatcctcccacttcagcctctccagtagctagaactacaggcatgtgccaccatgcctggctaatttttttgtattttttgtagagatggggtttagccatgttgtccaggctggtcttgaactgctgggctcaagcaatccacttgcctcggcctcccaaaatgctgggattacaggtgtgagccactgtgcccagccattccaccttgtatattttattacttaacagaagttatgtcaaaatctaaactaatgacatttgtctgtacatttatttttggaatttggaaataccaacctgtaaattgaaatgcagatggaaagagaacatgtattccagcactatgaaagtcaaacatgatgccaaaataaagtgcaatgcttccaaaaattgaaaaagcattcacaaaagtccaataagaagtatccaagccaatctgttgggaaaccagagaaaaacagagcactcattttggggagttagcaagaaataaaggatctaacaatcctgaaaacagaattcagcaagttaggcatgatgtggcttgaatactggaccagaaactaaaccatccttgactcaggcaagaaatagaaaatgtgcttggtataagagatgaaaatagcatttatattttgtaagtggcacaggtgcagtgggagtcaggtggatgtgcatgccaccctatatacagaaatataagtaggtaccaatagacactgaatacggccaatgaaagccacgtacctggaaattgactgttattacaagagcagaggcaatggtgacggcaaaagactggtagtcggaaggtgcctctccatcctgccctacggtttgcagataagctccaagaggtatgaagaagaggatcatcgatgttaggaccccatgcaacaagcttacaaagaatctcttatagttgaatagtaagtctctttgtcccactatgtataacccagggaatcggaggctcagtttgtcactcacatccttaaggagaaaacaaaatgatggtattttattcatcaggtcaaagcagtcagagatatgttataattaatatctcacaaaaagttgcagcctgctgttaaattttaggaaggcaaaaactgaacaagataatcgatcaatcctgcaatatttgtggtgtgcagagctcaacctcattgcttagaccaccattacttaatatttaattcagagaagggctaggtataagtttattactttgctacttatggaaagaaaacaaattagtaatgtccaaaaatatgtagggaggctactgtttttacctcctgagtgaatatatattgttgcaaatcctttgggaaaaaattttctcatacaagttgatgagttaattataaattattactttttagtctttatagtgcttctttctttttaagaattggtattagataaaaatatgcactagctacataaattttggaaaggatttaaactgactttaaaatgagtaaattattattgtggagacatattggactctcgggtgcctttttttccttttcttttctttttttttttttttttttggagacagggtctcactttgttgcccagcccggagtgcagtggcacaaacacaactcactgcagcttcaaccttccaggctcaagcgatcctcccacctcatcctgccaagtagctgggacttcacaggtgtgcactaccatgcccacaatttttaaatttttctgtagagatggggtctccctatgttgccagggctggtctcaaactcctgacctgaagcaatttgcctgcctcagcctcctaaagtgctgggattacaggcatgatccaccatgccctgccttcaggtatcttcatagtaagctcttactgtctaaaaggaacataacaaatatgtgtgccaatgaattcaacccagtcacagaaatcctcttttctctttttttttttttttttttttgtcttagagatggggtctcactttattgcccaggctagacttgaacacctgggctcaagtcatactcctgcatcagcctcccgagtagctgggactacagagaaatcctctttccttattacaaaacaagaagcacagccatgacccttgatgcctgacaacagaattataatagggtttgatcagaaagaagtaaacaccagaagaatgcattgaaacgtttgcttgggacttctctaacgcattctcatctgtccagaagtgtccctgcttgtgcgaggctcctacctggtcgagcagccccatgaggagcacgggcaggctggtgtacagcacgttgtagagggtgatgaaccaatcctcgtatgcagtctgtgaggggatgacagaggctccatgtcaccaacaaagacacatgccagcctagttagcacatactcatctgcttcctttatttaacattttgtttgtttgtttgttttaatagagatgggggtcttgctatgttgcctaggctggcctcgaactcctggccttaagcgatctccccatctcagcctcccaaagtgttgggattataggcaaaactctatgcacctggcctgttatcaatattctttttttttttcttctgagacagagtctcactctgtcgcccaggctggagtacagtggcgtgatcttggctcactgtaccttctgcctcccaggttcaagtgattcttctgcctcagcctcccaagtagctgggattacaggcacacgccaccatgtctggctaatttttgtgtattttgttgagacggggtttcaccatgttggccaggttggtctccaactcttgacctcaggtgacccgcccacctcggcctcccaaagtgctgggattataggcgtgagccactgcacccagccctgttatcgctactcttaatgtcaacatgaaaaaataaccaaagataaagataaaaacatacaagcaaatcccctcctttttttttttttttttgagacaaagtcttgcccaggttggagtgcaatagcgcagtctcggctcaccacaacctctgcctcccaggttcaagcgattctcctgcctcagcctcccgagtagctgggattacaggtgcctgccaccacacccggaaaatttttgtatttttagtagagaccaggtttcaccatgtcggccagactgatctcaaactcccgacttcaggcgatccacctgcctcagcctcccaaagtgctgggattacaggcgtgagccaccatgcctggccaaatcccctcctttctaaggtaaaatgtttttacagcaccagaaacatttagagaagtcatgatcattcttaattatgccccaactgtaaggagacacagccccaaaactacaaatatagaagaaataaattgtcttttcagaactagatttttattcatttaagagctctacttagtaaataacaataataacaacattacattacctgcgcagagtagccattgaagaaggagtaccagaaatgaaccaaagtaaaggcaaagtttttgtaaaagaagtatcgtaggaacttgcacatccttatgtaagaccatcggccatgcaccagcagtagcctctgcagatatcggaactgagcaaaggaatagtcactcgacatgacagcttgcattccttcttgtccacttattccaacgccaatgtgggcagctatggggcagagggagaaaacactgtggatcataaaccgattgtgaggcaaaacatcagttgataaaaatggttccatagcaaacaaaaaacaaagacagacattgatggaacaataatacagaagctcttgctcaccatccctcacccccagctcttgaactcaactcaaagtctgagttacaagttgctaaacagagcacacagtagggcctccataaatatctgggaaaggatctcatgtgggtgacgaattccatttggattatctgccaagatcacagccatcccttccatccacagggtgagccccaggcacccatgtgtacactgtgtccttgcctctttggcaacagctgtgtcagtcatgggcagatatgtaatttgtggtagatactacaaatcggctcccccaacttcattccatccttgttctaattagagaggtgggaaaggaaataaaaaccctacatttcccagactcccttgcagctaggctctttgtgaattaggttccactgtttagatccacttatgacttggaagcagaagtgaatcagagcccagcatcgcttcctcttttgggatttctgcagcagagctcatatctactttccagctacctggatgttgacaggcaactataaaggcttcttaatttggaagctctttagaggaacctcttatcacttaccagaagagtagaagctcttctggtaagtgacccagcctagaccctgcttctgtagaccatccagagcttttgaaagtacctagtcccctgtatgaatcttttcttgcttaaataccaactggggtctgtttcctgtgctaaaccctgactgacagaaaacccaagctgagccagtctctctcttgatattctggaattagaagtcagttattttgtgtctagaattttaaggtctaaattcttgaggtaagaaatagttatatttctttctctctcttttttttttttttttgagatgaagtctcactctgtcacccaggctgcagtgcaatggcgcagtcttggctcactgcaacctctgcctcctgggttcaagcgatactcttgcctcagcctctcgagtagctgggattacagatgtgcgccaccacacccagctaatttttgtagagacggggtttcaccatgttgtccaggcaggccttgaactcctgaactcaggtgatccacctgccttggcctcccaaagtgctaggattacacacatgaacaactgtgcctggccgaaatagatatatttcttcctgaagatttctaaggggcagagaaataaagtagtggggagagaggggtggggaggagggagagaatggagggagagaatggggggagagaagagtggggagagaagagtggggagagaagggagggaggggagagagagaaggaggggaagaaggaggaaagggagagagaaggggagagagacagacagacacggggttcctggtgcaaatctatgtccttgttccagtatcttcctgaggcctggcttcttcttggacaacaggaggtgtttaaataaatttacttttttcttttttttcttttaagttacaggatacctgtgcagaacgtgcaggtttgttacatgggtatacgtgtgccatggtggtttgctgcacctattgacccatcctctaggttccctcccctcgtctcccactcctcaaatttaattttttcttaagctagctttggttgttctccaatacttgtaatcaaaagagttttaaccaagaaactattaaactttcaaagtcttattcatggccctctgggaccttaagacattttttttttctttacgggggaaggtttccagaatatataaaattaaagtcacaattttatttatgcttccaatagtcataaataacactttcaaattagagaatgattagttttgtctgggtcttaaaagtaacgaatgtgaagatagacaagatcatttagaaaagatatgttggagaacacaacctatcattgctcagaccctgaaaagtggctgcaatgctgcggcgttccaactaaaaagaagcttcaaaaatcctgccctagttacagaacacaaggtctggcaaattcaaaacataactgtagtgatgtatccaaacctacgttttcagtaacacttctaaaaaaacagaacaaactgcatctcatataatatttatgttctctttgaaaacacacaaatatttcctatgaccagcatggttgccaaacttgctctttcctgccaaaccatggccttttctttcctgaacaagccactgaggaaaatgctgagattctcttggcttatgtggctgaggaagaggaagccctgccccaggccctggtatccagtcctcaaccttcccgctgagcagaccaaggacaaatgtgaaatgaacactgtcatagttcccagggcaaccaaaagcactgaacagatacactataaggtaacattggtcttttttgtaaaatttaagtacaggcatttagagtttcctgaaatctcaaatgcggtgttaggtgcctcactggtagacattcttttatcattccttaacaaaaagaatatttcctcgctacagcaataatccctcttgcctttttttttttgagatggagtctttttctgtcgcccaggctggagtgcagtggtgcgatcttggctcaatgcaacctctgcctcctgggttccagtgactctcctgcctcaggctcccgagtggctgggattacaggtgcccgccacccccatgcccggctaatttttgtacttttagtggagatggggtttcatcatgttggccaggctggtctcgaactcccaacctcaggtgatctgcctgccttggcctcccaaagtgctgggattacaggcatgagccaccatgccccaccttgcctttatctctctcctgcttcacgtacattctcagggtctaagaccaagaagagacaacatccacccagctggtatgagatatcttcaggtaggatagagggagaaggcagcctatgatagtccttggatccttgctaggggcagaaacatggtgggtcatgattccttcacttcttccagactacactgctaaacgtgaatgttagcaaatgctcagattattttttgacacttgaataatttcactcgactactttatgaccaacaatttctttgtgtgtgtgtgtgtgtgtgtgtgtgtgtgtgtgtgtgtgttcttttttgttgttggagaaagggtcttgctctgtcacccagggtggagtgcagtggcacaaacatggctcactgtagtctcaacttctcaggctcaagtaatccttccgtctcagcctcccacgtagctgggactaccggtgtgtgccccatacttggctaaactttctgtatattgttattgatgtggttggaagaaatgacagcttttacaaagtacataaaggcactaatactacttgtataacttctaaggagacccctaaagtttcctatatttttatcccaaagggatgctctataacttatatataaaagtacctggggccaggtgaggtggctcatgcctgtaatcctagcactttgggagactgaggcaggcagactgattgagcccaggagttcaagaccagcctgagcaacatggcaaattcccaactctacaaaaaatacaaaaattagctgggcatggtggctcatgcctgtagtcccagctacttgggaggctgaggtgggaggattgtttgaggccaggaggtggaggttgcagtaagccaaggtcatgccactgcaccccagcctgggccacagagggagaccttgttttttttttaaatgcacctggcatataacagtgcttaataaaaattttaagacaacttaagaaaaacaagcccctctaagattatctacattgactttgtgcaatccctctcattatgtattggtgaactcagaggaacaaaatgtttcaagtctaagtcacataatcagttgataaatctccaaagcaaacccgtcccctcccattatctagaaggctactttataactgaataaaaatcatgtttgacttgtccttttggcacggctagttacgttaaaggtacgtaatggaaaataaactagagctggctggctatggaggaaagagatagatctaactccgagcaagcaataccattcgcatggtagggcaagcacatgcaaaaaaaaaaaaaaaaacagtgtggatgaattaaactgctagtgaccacagacatacgcactgataaagaaggcaagatgacatacgtcatacagctgactcctgttgaggaagataaagttggaatattcttagtatacatcaaggaggaggaggagactaagaaaagaaagagacagactcatgagtcacaaaatagactgaaaagtctagttatatataatgcatttaagcaacccagcatcacaggaacatgcaattacctatgtacagtcaggtaatacttcagctcagtgataataatacgacagagctggaggtgacattagggattattttcttttccgatgagaaaactgaaacctgagcataagcccaaggtgacaccggattttggcaataggatgaggatgaatatccaggtcattagtttgagtatttttaatacaagatactcccttatagtgacagagggaggaaaaaggaacagaattcagacatagagatgagggctgtgggtgtgcttctgcaggctttaataccagcacaactgtatttctgcatggcaggactcaatattttaattgtgtggacttaaattctagcatccagaaaaaggcagccttctagggaggtgaggaggatgatgagagcacgtggaagcttttcttcagtgctaaacatgttactctaaactcacaccaggtgacccaatgatgaagttcccacagatttaccaaaggtaggaagaaagtcccagaaagaaatgcttagatgaaggagaatgatattgtcaaagcaagcaccagccagagttcaataatttatgtcttacaaaacttattaaatatcagggttttttgttttgttttgtttttttgagatggagtctcactctgtcgtccaggctggagtgcagtggcacgatctcagctcactgtaacctccgcctcctgggttcaagtgattttcctgcctcagcctcccgagtagctgggattacaggtgtgcaccaccacacctggctaatttttgtatttttaatagagacggggtttcagcatcttgatcaggctggtctcgaactcctgaccttgtgatccacctgcctcggcttcccaaaatgctgggattataggcgtgagccactgtgcccagccaatatcagggcttttaataaacccaaaatatgggaagagaaccagtaagagagaaaaaaatacacaacatctatataaaagaataaaaatataaggataaatttccccccatagaccttattttcctcttcgcatccttcagaagccctgtcagtgatactctttcctcctgatgggctgtgggctttctgggggtagggtcacaggcgttgtcatggttaagtgactttatgaaacatctgctctatgaaaacctaagctgtaaaatctaaaaaaagaaaatccaccccctacacattccagccatttctcctctctagcacgttgggcctcactggccgtgggtgcatgactcacttttgatcatgttcacgtcattggccccatctccgatggccagcgtgatggctttcttgtacctcttcaccaggtccaccaccatggccttctgcttgggggtgacgcggcagcagatgactgcgctgcactcgcaggccaggtccacaaagtttttctgccgctgctctttcttagcttctagcctccttttactttgggtccgcatccgtctttcttcttctgttcttgggaacttcagcttcagaatcttatttctcttggtctttttctcgagaagaatttcattctgtgaaatcagagagggaaaaggttacattcactttagttttaccccaggagtaccattcccaagatttaaattatgtgaaggataatttttggattatgtcactgattatatttgacaaataaatttgattttataaccaaaacatgtatatatatgtgtgcgtgtgtatgtatatacacacgcacacatatatgtatgtgtgtatgtatatacacacacacacacacacacatatatatatatatatattttttttttttttttttttgagatggagtctcactctgttgccaggctggaatgcagtggcacgatctcggctcactgtaacctctgccttccaggttcaagcaatttccctgcctcagcctcccgagtagccgggactacaggtgtgcaccaccacgcctggctaattattttttttgtattttagtagagacggggtttcaccatattggccaggatggtctccatctcctgaccttgtgatctgcccgccttggcctcccaaagtgctgggagcacaggcgtgagccactgtgctcagctatatatatatttttcaatggagatggggtcttgctgtatagcctgggttgaagtgcagtggctattcattcacaagtgtgatcattgcatgctgcagcctcgaacacctaagctcaaaccaccctcctgcttcaacctccagaggagctgggactacaggcgcatgccaccacatccagcttataaaatatatatgcaacaaaaatttagaaaatctaacaatctataaagaagaaaatgaaaaaacccattaattagtaaaccaagataaccacttttacctctttggtatacatcctttcatatatcatatattattaagtctcaaacttggaaaaaccacactttcatgtataggctaagagacttttaggttggcagttaacatgtgaaagcatctaaaagtggctccaaatgaacttctttcttttgagttaaaggcacagatacactaatgatacgtaccaaccaagaaccagtgatgattaaggcacggtttccaccgggtggaaaaaaagattcctgcacaggaggtgcaaactttgcgtagacgccacctctattcctctggttttccatccttgcatgaagaagagaactaggggaaaccaaatttcagtgtttaaagtgtaagaccctaaataggcccttgactctgagataactttgacttaaaaaaaattgtgacaaaaaaacaaagtttaccatcttacctatttttgtttctttattttattttcattataatttttttgagagagggtctcactctgtcacccaggctggagagcagtggcatgatcatggatcactgcagccttgacctcccagcctcaagtgattctcctgcctcagcctcctgagttgctgggactataggcacacgctatcacgcctggctaatttttgtattttttgtagcaatagggttttgccatatcccgggctttgaccatttttaagtgtacaacttagtagtgttaactatagtcacattgttatccaaccaatctctagaactttttcatcttgcaaaacggaaactctatacctattaaacaataacacctcacctcactcgccctccagtccctggtaacttccagttaactttctgtttgaatgaatttgagcactctagatacctcatatatgtgaaatcaaacagtatttgtctttctgtgactggtttatttcacttagcttaatgtcttcaaggttcatctatataatatatgtcataatttccttcctttttaaagttgaatatattccattatgtggaagcaccacattctgtttatccattcactcactgatgggcacctgggttgcgtccatctcttggctgctgtgaacagtgttgctgtgaacatgggtgtgcatgtatctctttgagatcctgctttcaattattttgtggatatacccagaagtgggattgttgcatcatatggtaatcctttttgaaattttttgaaacatcaccatactgttttgcatagtggctgcaccattttatatatttcatcaacaacacacaaaggttccttcaacaatgattgttattttctattgtgttttgtttttgatagtagccatcctaaagggtgtgaggtgttatcttgctttggttttgatttatcttcccctaatgattagtgatgatgagcctcctttcacatgtttatcagccatttgcatgtcctctttggaaaaatgtctactcaaagtgctttgcccattttttttttttttttttttttttgaggcagagtctcgctctgtcaccaggctggagtgcagtggtgttatctcagctcactgcaacatccacctcctaggttcaagctattcttccacctcagcctcccaagtagctgggactacagacgggcaccaccatgcccagctaatttttgtatttttagtagagacagggtttcaccatgttggccaggatggtctcaatctcttgacttcatgatccacccgcctcagccccccacagtgctgggattacaggcatgagccaccacgcctggccagcccttttttttttttttttttaactgagcgacatgtaattttactatgtctcgattcatccaccatgggggtaccatgtaattcatcatttttcaaagacagtcaaaggaagatacagttgaaaatgtatacacagcaacagaagaaaggcaatcttaggccaggcactgtggctcacacctgtaatcccagcactttgggaggctgagacgggcagatcagtcgaggtcaggagttcgcagccagactggccaacatagtgaaactctgtctctactaaaaatacaaaaattacccaggcgtggtggcggtgcctgtaatcccagttacttgggaggctgaggcatgaggatcacttgaacccaggaggcggaggttgcaatgagccaagattgcaccactgcactccagcctgggtgacagagtctttctaagaaaaaaaaaaaaaaaaaaaaggaaaggcaatcttgatctgaattagaatactggctattgtttgttaggaataaacttattttcatataaacaaaactatatctgtgtttgagaaattctcagtgctttatatcaacaaattaaatgtttgtgttaaaatgatatatgtgacaaggctacgtgtaacactttcatgtgatagaaaaatgagtcatgaaattttggagtggaagggaccttaaatatcttgtccaatctcttcatgttacaaataaggaaatcaagccagaggaaggtgatgtgatttgcctgctgcaggttgataggaaaactagaatgaggactcagttatcttgtaacttctggctcaggactcttactattacatacaaaaagccattgttcttctccttccaaagaaggcttctcagcctttgcactcttgatgtcttgggcctaataatcctttattttgtgtggccatcccttgcactggaggatgtttagcaacatccctggcctctacccactagaagccaggagcacttctctgcagctgaaacaagcaagtgtctctggacagtgccaaagggtccctggaaggcaaactcactccccacggagaatcactgcactagaggattaagtatctagtatcccttttccacatcaatttaattctcattttcaagttaaaagtgagtgactaagacaaatcattgaaaggccgtaagagaaaaaaaatgaagataccttctattcaaatcattttataggaatcatcaatttaagagccacctgggaagatgattcctctctctataaaggtaaactcagctaagggcatggtcacaacatttgctacttgcatacattttatcttttactttagcttcgggaccaatttttaagactttcaaaagagagaccagaaatttttttacagccccatctacaaaaaataaacaaagccatatagtaattaatcagattacttgaagcccaaaactactaaagtaaactcattaagcattaagcatttatttgtctgttgctactttttttttttgagacggagtcttgctctgtcacccaggcaggagtgtagtggcactatcttggctcactgcaacctctgcctcccaggttcaagcaattctcctgcctcagtctcccgagtagctgggattccaggcacatgccaccatgcctggctaatttttgtatttttagtagagacggggtttcatcatatcagtcaggctgttctcaaaatcctgacctcgtgatccacccgcctcggcctcccaatgtgctggtattacaagcatgagccaccgtgcccagcctgttgctacttttttaaaacctaaaagcacaaaggggcatggcttatgtacctctatttgggcacataaactaaatcagttctaaatggaactgatttagatcataaggctactgattttgtctaatttgacggaatacctaatatactagaacaactagaaaatgctttatcaccatcattagaaataagactaatattgaccatcaattccctcatcactttatcacacctggcaaatgtgtatgttaacagtttaatctgacctcatgctggcctgagagaagctctgtagggaaaaatcttgaggaactgtcaggccatcagtaaacacatcacagtaactgtgtgcagcatatttatagcttcagaacaagacagggctttttcatcatacatttccaggtctgctgcgactctgattcaaagctaacaaacgtttcagcatatgctaacatttgaattatcaggcctgccccacctagactagattacaggggacctacatgatgtaacccacccacacatttccttcccgcaaaagttttgggttttttttttcctttcttctatttccctttcaaaagtaaaagttcctagaaaaagcaaaataggactataattcatattaatttgctagcgatattacaggctttttacggaatttttagtaggtgaaccgagttttttttttttttttaatgagacagagtttcactcttgtcacctaggctggagtacagtggcgtgatcttggctcactgcaacctctgcctcctgggttcaagtgattctcctgcctcagcctcccgagtagctgagataacaggcaccgggcaccacacccagctaatttttgtagttttagtagagacggggtttcaccatgttggccaggctgctctagaactcctgacttcaggtgatccacccgcctcggcctcccaaagggctgggattacaggcatgagccactgcgcctggcctgagctgagaaggaatggagaaaaatggcctctgaagggccccaagtttccctaaaagtaaaatctgctcaaatttaggctgcaccttgattacttggaactgcctgttgttgtcttgcctcatttaaacatgaggaaactgccccaagtgacacatcgtaacccctatttcttcatatctgctatcttctacagacagtcttgcatttgcaaagatgagctattacgtaatttcatactgcaggcttttactcacttaatatcctccccatagcagatggtggtgtcttcagtcagaagttcacaagcaaatcctatattttcagcagtttctacaatagaataaaattaagtcaaatgtcattcctgctgtttttattttattttattttgttttttgagacagcatctcactcccactgcctaggctggagtgcagtggcacaatctctgctcactacagcctcaacctccaggattcaagtgatctgcccatctcagcaccacccgcagcccccaagtagctgggactacgcaactcgctgccaagccaccaaacaatttgtgttttttctagagatggggttttgtcatgtttgccaggctcattcttactgttgaactgaataattgattttacctagtaatgatattttttagttcatgaacataaccagattcacacaaacacactatttttctatagcaatctgtaggaatcacatgcagaagaaaaatccttttctccataataaaacaagtgaaagtcaaagtctaatttgaaatgttttcaataataaaatgtgctatattatcaaacatataaactggttatttagtaaaccaatgttcattaaattactaaacactctcagttcctggttcaattactctgttattggcggggggcgggggcagagggaagcataataatttccaccaacccttacgtgaagattttttttccttttaaattaccacccaatttggcatttatttaaggtcagggctgtgcttcccataactttgcagagtgtgtaacccgttgacgatttcagcgcaagagacattatttgatttcttgtggaaggcttacaaagtaaagtatcaataccaaacaagtgcttgttgagttctaaagttaaaaaattaaaatcgttctttccttaggtatacaattttattgccaagcaataaaattggcaagaaaaccaaagttattgttcagtactttgtattgttctactctgtgcccaccaaatgtcaaagcactggaaggacagagggacaagagggatggccctttcaggacgggaacccacgtctggctggagagataagaccaattataatcagcaagacatggccaggagctaaattataaggaagaaactgctactgagggggatcaggaaaggatgcagaagaatgtgctggaaaaacagaggagggtttctcagaaaaagcatcttccgtccaaagaaacagtgtttgtacaggatgaaaagtctgaggaggtcatcttgggcaaaggaaacggcagctataaatatttgtgaattaacagatatgcttccctgcacaatgaattaccctttttgtctccagtaagcacccagatcttaatgtcagcttttgcaagttttgaaatggtttctggaactccatcctgtagcttgtcttcaatagctgtagctcccaggagctagaatgtatattaaaaaaaaaaaaaaaaggaattagcaaacaaaccaaaagttttctgtaattacaggttgccaacctgtaaaaagaagggctaattatacatcctggttgctgctctcctggggccaatggccagtgttaacagggaaggctgccatgtttcacaattactgcaaaccaacacacctaaaaactttttccctaaaggatgaactatttaatttaccaagacaaaaatgcaagtacaaaatcaaggatgttaaaaatacacttttcttgtgtatttgtggctttatactgacataaaccgtaaaccagttgcaatactagctatttgttgaatattttccacttatctaaaccctacaaaaactatgtattaaatttggaaaacttttagaaacaatatatttttcttatttcaagattttgcagaatatgaattgtttcggtaattcccccaatgtaataagtattagatgcaggtttgttattgtttaaaaattataataaattttaataagtgatatacaaattatggaattaaattagaacttctcctaatgtattttgtcttttggtttctcataatggcaacttctgttctgctcctattttggtgaataaaagaaataaccttcttccattgtgccagtgtcaaatgctgaagttacaattatctcttaagcatgagatcaaatattcaataaaacttaataaaaatttcaattctgcttagaatatcaaagaaaaagttattaaggctaaaactcacaattaagtctttttcaatctcctcatatactttatccagagcttcgtcccggttggtggaggccacactggcagccataaactttttattccattctgtaaattctttttcttcaatttccttgtagcaaaggcatagggttctaagagtttcatttgcaaagatctgttttatttaaaaaaataaatccaccaatgcaaagaatagttaatttatgtaattcaggatcaagtctgaaattttactttgaagtaatatactaacagaatttaaaaagagatcattaaacatgacagattctgtacaaatacactttagagaggggattaaatgtcactttttttttttttgagacaaggtctggctttatcatccaggctgggatgcagtgatgcaatcccggctcactgcaacctctgccttccaggctgaagccatcctctcacctcagcctcccaagtagctgggactacaggtgtgcaccaccacgcctggtaatttttgtacttttttttgtagagatggggtttcatcatgctggtcttgaactcacgagctcatgtgatctgcccaactcagcctcccagcgtgctgggattacaggcatgagccactgcacccagcctaaacatcactttataatagactttgcttttctaaacttctatagggtccaggactgcacttccagtttccaaagggaaaagcttacctttcttctaaatcttctattacctttctcattttctcattttctctttttctcttcatgactaggaaaatatcagaccaagggagctgccttggggtgtaatgacataagcacgaacctgacaactttataacttgttccaacaaactgtgatacaagtccaatcacctatgaactctccactaagcattattccctcaaaccaattctaaaatacacaagccattgttaaagctgaggtcaaagcttttaatggaaaagagtatctggcaattttcccatgatgaacgattcaaacattttctttttttttctttttctttttcttttttttttttttgagatgaagtctcactctatcgcccaggcttgagtgcagtggtgcgatctcggttcactgcaacctctgcctccctggttcacgccattctcctgcctcagcctcctgagtagctgggattacaggcgggtgccactgcatctggctaatctttgtatttttggtagagacggggtttcaccatgttggccaggatggtctcgatctgttaacctcgtgatctgccacctcaccctcccaaagtactgggattacaggcgtgagctactgcacccagcctgatttaaacattttaaacagtttcaacatgaaccagtaaacatctcattactttatagtcacatcttttttattttgaccaagttttgctcttgtcgcccaggctggagtgcaatggtacgatctcggctcactctaccccctccctctggggttcaagcgattctcctgcctcagcttcccaagtagctgggattacaggtgcccaccaccacacccagttaatttttttgtatttttagtggagacggggtttcaccacgttggccaggctggtcttgaactcctgacctcaggtgatacacccgccttggcctcccaaagtgctgggactacaggcatgagacaccaaatactcaatcagttgaaccgcttctgccatcttggctagacaagatgtgacctatagtcagctctgtcatcctgtcacatatgaatgctttccttcctttgcactacaacttgaagttagtggaggtcttggggaccacacacatagtaagactacaacctagtatggttatgtagcttgctcaaggccactggaagagagctaagccattcccctgcctcagtcctatagaccttgaagacccacatgctgggagagggcaccatggtgatatcccaggaagtcagtggcaggggcagaactgggacccaggtggctgtattcctactttactgctctttccaccccaactattgcaaagcaaagggagggtcagcagttaacatacagctttcatgcaaacttaacagacagcatcagagagtaagttcagaatcccttgcagaaagaataaaagtgaaacttacatccagggcatcctgtgtttcttgcttagtaggattcattcgatgtaaccgttcataaataacagtgtcagcacctttacagtaaagcttgatattgccttctggggttcttactggtagtaaaagaaggaaataaacacaacaaagtttgattttttatatatatattttttgagacagggtcttgctctgttgtccaggctggagtgcagcagttcagtatcggctcactgtagcctcgaccccccaggctcaagcaatcctcccatctcagcctcccgagtagctgggactacaggtgcatgccaccatgcctggctaatttttatttttatagacattggaggtctcactatgttacccaggctggtcttgaactcctgggctcaagcaatcctcctgcctcagcctcccaaaatgctgggattacagatgtgagttaccacacccagctaagtttgattttttaatagaaaactacatttataaagttaatttgaaatgttactatctcataattcactgttagcttaaaaccatcagttcctctagaaaagtgttgccttcaacaaaactggtaagtcattatctacattgaatgtaatagtgaaataaatataaaaagattccttcacagtcagctctgttttttataacctcagttattcttccaacaaatatttactgactccctaccatgtgctatgccatgttctagttactttcttttgtagactttttctccatccaaccaacaggtagtttctcacctatgaactcacaacacttactgcttttaatacttcgaccacaacaccactcctaatgaccattttttttgggttttttgattaatgcaataattgtaatacatccctcactgttaaccagattttaaatcaaggtagatggcaagcatgataatcagtctagatctgtgtaagggacacagaaagcgttcagtaagtgtgcctaaggagggtgtaatagttaaacctgtatatttttattggttaaaaattcaatcatagtggagaaggcttgtagataccaccttaaccaagtgatcaaagttaacatccccattaatgagacaaaccaataatatataccttctggctaggcagggtggctcacgcctgtaatcccagcactctgggaggccaaggcgggccagtcacctgaggtcggcagttggagaccagcctgaccaacatggagaaaccttgtttctactaaaaatacaaaattaaccaggcatggtggcacatgcctgtaatcccagctactcagaaggctgaggcaggagaatcacttgaaccagggaggtagaggttgcagtgagccgagatagcaccattgcacttcagcctgggcagcaagagtgaaactctgtctcaaaaaaaaaaaaaaaaaaagtatatatatatatatatatatatatatatatatatatatatatataacatgtatatacacatatatacatacatatatctacatatatacacacatatataaatacatgtatatataaatatacatatataaatatatgtatatatatataaatataaatgtgtgtgtgtgtatacaccttctgatgtgatacttaaagaaaagcacagcatcacttacggactcttcctgccaacaatgtgtaacctagctctaatcatgagggaacatcagacaaacgcaaatggagggatagcctataaaataaccagcctgtgctttttaaaaatatcaatggatgaaagatcaaaaagagattgaaccgtccttgactcagagtcatgatcacctaatataacctgtgatcttagattggatcctggaccagaaaaacaaagaatgaacctccctggtaaaatctgataaagtctattgattagataatattgtactgtgttaaattttctggttctgaacattgcactgtatatataagtgagtgcttctgttcttaggaaatacctactatggtatatagtacagtatttaggggaaagggacattaggcctgcaatttattctcttttttatatttttattttctttttttatcatgtaatcttgctccttctaacgcaatttactctcaaatggttcagaaaacaataacctgtatgtatgtgtgtgtacatatatatgtgtgtatatatataggtatatataatgaaattacatatatataattagatatatattagatctatatatagagatatgtaaatgaaatttcattatgttaacaattggtggatatggaagagtatgagggctctttaaaccattcttgtaacttttctataagtttgagattatttcaaattacgaatttaaagcagttcagtggtaggaagtgattttcatcttcacttggtggtctgttatgtgcctgcattgcagatatgattttgattcataagcatagctttgcttttctcagaaatcttttcctgctgagtcctcccttccctgccatcaagtacagaagagagcactcagaggtgctcaaaaaataaaagagcatgtgttgtttaaaataaaagactgctacaaatgtctacctgctgcttcagaaatgttccacctgctgccccagattcagcatctggcagcccacgtggttaaagaatgtcagcagctgtaatcccagctactcaggaggctgaggcaggagactcgcttgaacctgggaggcggaggttgcagtgacctgagatcgcaccactgcactcctgggtgacggagcaagactccatctcaaaaaaaaaaaaaaaaagaaaagaaaagaaaaaaaagagagggattaaaaaagaacgtcagcagcatttgcaagattcagagatactgtggctacccctttgagtagggaacacagtgaagaatgaagaaaacaataccagtttcttttttttttttttttgagacggagtcttgctttatcgcccaggctggaatgcagtggcgcgatgtcggctcactgcaagctctgcctcccgggttcacgccattctcctgtctcagcctcccgagtggctgggactacaggtgccagccaccacgcccggctaattttttttgtatttttagtagagacggggtttcaccgtgttagccaggatggtctcgatctcctgacctcgtgatccacccgcctcggcctcccaaagtgctgggattacaggcgtgagccaccacgcccagccaacaataccagtttcagtaaagctgcagaaatctcccaggagccaagtagctctttcactggctgctttatcctgatgccactcaatacaatgggcacaagcaacatctaaatgagcgattcatagacagactctgagggggacttaccaatgatagacattcgcttccggtcactgttgaagtccaaaatggcaagaacattgtaagtcctttcagtgcccagttcactgatggtgatggtgttctgggtcctggcgaggaaggcaaagccaaagttcctggcagcgtttaccagggcaccttcatcgggagaggctgcctggtagttgagctgacctaacaaggaagcgagagaaatcccagaaaagctgtaaaaacaaatgcagagctcattgttgaggcctctgctgaggctcctgtgggggtcagatgggctgcaaagcccaaaacatccccaggaaaacgagtcattgacttggaagggttatgccaagattaaaacttctttgttttatcttgacttataaacagtaatataaactaaaaaagaaacattggtggagaatgagggaaaattcccataatcccaccatccacaggagaaacaacaggtgttgacattttatcattccctccagtgccttttaaaatgtctgtatctgaaattgtttctatcaagctgaatatacatttacatcctgattattttaatgctgtatctgagcatattgccatccctttttaaattctttataaacatttgaacaaatgtaaatatgttatcattttcccattacagacacttaatttccaaatttttttactctcaaaaagtcacactttaataacccttttgtatgtgtgtaaagatttttctgtttcttttttctttttagagacagaggtctccctatgttgtccaggctgctcttgatctccggggcccaagtgatccttctgcctcagcctaatgagtcgctagggctacaggctcatgtcacctcacctggcttattctctttctttcttgtttttctgaaacagggtctcaccgtgttgcccaggttgcagtgcagtggcacgatcatggctcactgaagcctcaatctccccaggctcagtgatcctcctacctcatcttcccatgtagctgggattactggtacacgccaccacacctggctaattttttgtattttttgtagagacggggtttcaccatgttgctcaggctggtctcaaactcctggactcaagtgattcgcctgcctcagtccctaaagtgttcggattacaggcatgagccactgcccctgggcccctggcttattttctaagagcagattcctattaggaaaatactgagccagagaacactgataattttaaaactcattggtatacaatactaatttgttttccaagaaggttgtaccagtttatcttccctctaaaaaagtatgttttctttctttctttcttttttgtttttttgagacagtcttactctggcaccaaggctggagtgcagtggcaccatctcagctcactgcagccttgatcgcttcaggcgcaagtgatcctcccacctcagcttcctgagtagttgggactataggcgcacatcaccacgcccagctaatgtttgtattttttgtagagacaggatctcaccatgttgcccaggctattttttctttaccatagctatattctccttattaaaaaaaaaaagaaaaaaaaaccacacaggctgggtgcagtggctcacgcctgtaatcccagcaatttgggaggctgaggcaggtagatcatgaggtcaggagatggagaccatcctggctaacacagtgaaactctgtctctactaaaaacacagaaaattagccaggcatggtggcacgtgcctatagttccagctactcgggaggctgaggcaggagaatcacttgaacccagaaggtggaggttgcagtgagccgagatctcgccactgcactccaccctggtgacagaccgagactccatttcaaaaaaaaaaaaaaaaaaaaagaaagaaagaaaagttgaaacaaaccaaccaaccttagtttgatcactatccgatatcttaatgtttaaaagttaaataatggaaaattgtcttctattcacaactacatttcaacaataagaataagctaggttcagtggcacgtgcctataattgcaactattcaggaggctgaggcaggaggatcacttgagcccaggagtgtgaggttacagtgagctttgatattccactgcactccagcctggctgacagagcaagatgcagtctcttttaggaaaaaagaaaaaaccaataagaagaggaataaatctcacagccagatacacaaaagagtacatatgctacatgattccactgaaataagccaaaaaactgacagagctaacctgtgttattcgtagtcaggaaagtacttttcttgtaatcactggaaaggaatgtaaagggaattctagggggattgataatgttcttttttaaaaatctgggtgctcattacaagagtattggtttgtgaaaattcattgagttatatacttatgatacgtacatatctctgtatacacatgttgtacttcaataaaaagtttaaaaaatactctgcctacccaagatcttctatttttctactctagttattttgtctcaaaatagaaggaaaagcatttccgtggccagatgactttggacagaaagagcatttagttttccaaaatactttgaccaggatgaaggccacagatgcatgagcagcctcacttggaatggttggtgctctggggtaacggtggcagagagagctaaacacaccttccttccttccttcacaattggctcagaggattcactttttaagtcaatattaatcacttcctaattaataattaaagatgacacttagggtctctctgtatttgttcactcagaaagtcattcactagaagctataaacgcacttcctaaatccggccatctagcaatcatatacaaatgctagagggcaaactatttaaccagagacaaatcagcagcggtgagaacaaagcctttcccttcggcaacttaagttggcacagcgatatatggcataatattgacagcaaacgcatttccagcagagaaaaggaacaaaataataaaaagtggtaaagttcccacaagtaagacactcatatctagagcaaacaccttgatatttttatcattaaagaaaaaaaaatgttttccattaccttctgataatggaatcacagaattgcagactaacagagatgggaagaacgtcagtgacttggtccaaattccaaccttatgactgctggaagacacttggactaaaaaactatgcagccataaaaaggaacaaaatcatgtcctttgtcacaatagagattaggccattatcctaagcaaattaactcaggaacagaagaccacatacctaccacatgttctcacttaacattgggtactcatggacataaagactgcaaaaatagatagtggggacttcaagagaaaggagggagggagggcaacaagtgttgaaaaacttactattagggcagggcacggtggctcacacctgtaatcccagcactttgggaggctgaggcgggtggatcacaaggtcaggagtttgagaccggcctggccaacatagtgaaaccccgtctctactaaaaatgtaaaaaattagccacgtgtggtggtatgcacctgtaatcccagctacttgggaggctgaggcaggagaatcgcataaacccgggaggcagaggttgcagtgaaccgagatcacaccattgcactccagcccaggcgatagttcgagattctatctcaaaaaaaaaaaaagaagagaaaagaaaagagtgtggtgttgatggtatagtggtgagcatagctgccttccaagcaattgacccgacttcgattcccagccaatgcagcaggctgaccttttgtcctggctaacatggtgaaaccctgtctctactaaaaatacaaaaaaaattagccaggcatggtggcgggtgcctgtagtcccagctacttgggaggctgaggcaggagaatcgcataaacccgggaggcagaggttgcagtgaaccgagatcacaccattgcactccagcccaggcgatagttcgagattctatctcaaaaaaaaaaaaaaagaagagaaaagaaaagagtgtggtgttgatggtatagtggtgagcatagctgccttccaagcaattgacccgacttcaattcccagccaacgcagcaggctgacctttcgtcctggctaacatggtgaaaccctgtctctactaaaaatacaaaaaaaattagccaggcatggtggcgggtgcctgtagtcccagctacttgggaggctgaggcaggagaatgcatgaacccgggaggcagagcttgcagtgagccgagatcgcgccactgctctccagcctgggcaacagagcaagactctgtctcaaaaaaaaaaaagaataaaaaagaaaagaaaaactaactattaagttctgtgttcactacctggatgatgggatcaattgtaccccaaacttcaggatcatgcaatatacccatgtaacaaacatgcacatgtatcccctgaacctaaaataaaaattgaaggtgtaaaaacaaactaaaaaaacaaacaaaaacaaagcaaccttcctaagaaaactctttatttatggcacatttagaggcaaccagaaagaccttctttttctttcacacactaatttgtggctcatgaaattgatgtaatcaaagaaagatgctcaaaccacaaatcccacctctcagttctcatcaacctgattccctagcttcagggtaatggtggcagagaaagctaaatgcacctttcttctctccttcacaactgcctcagctgattcactctaatttctttttgagatggagtctcactttgtcgcccaggctggagcgcagtggcaaaatctcggctcacagcaacctccgcctcgcgggttcaagcaattctcctgtctcagcctcccaagtagctgggactacaggtgcccgccaccacgcccagctaatttttgtatgtttagtagaggtggggtttcacaatattggtcaggctggtcttgaactcctgacctcaggtgatccgcctacctcagactcccaaagtgctgggattacaggcgtgaatcactgcacccggctcactctaattaagtgacaataaactacctggccaggcatggtggctcacacctgtaatcccagtgctttgggaggctgaggcgggtggatcacctgaggttaggagttcaagacaagcctggccaacatggcaaaactccatctctactaaaaatacaaaaagttagccagggtttggtgtgggcgcctgtaatcccagctactcgggaggctgaggcaggagaatcacctgaacctgggaggcagaggttgcagtgagccaagattgcggcactgtactccaacctgggcaacaggagcgagactcagtctcaaaaaaaaaaaaaaaaaaaaaaaaagactgggtgtggtggctcacacctgtaatcccagcacctttgggaggtcaaggctggaggattacttgaggtcgggagtttaagaccagcctgaccaacatggagaaaccccatctctattaaaaatgcaaaattagctgggtgtggtggggcatgcctgtaatcccagctactcggaggctgaggcaggagaattgattaaacccgggagacggaggttgcagtgagccgagatcatgccattgcactccagcctgggcaataagagtgaaacttggtctcaaaaacaaaacaaaacaaaacaaaacaaaacaaaaaaaaaaccacacacgctcacaaaaacaagccctagctctcagatgtctttttctcctcaatcctctcaccccctttaaatgatttgccaagtgtctcccacatccatggctttgttatccttcccaaagaccccatactaatgcaaaccttcagcctctgtgccaatctccagtgcctacctgctccagactctcacacccgtgatgcgcaaaactcctgaaacaagctctctgatcattaactcagaacctccaggtgaagtgaaggcttccaagccttccacattctgctctcacatgacctctgtgcaggcgggagtctgcaatggcctcaaggttcccatcccagtgctgtacattcactttctcccatttactcaatcaagcactaatctaggtactgctgtgaagggaatttgcagatgtgcgatcctaatcagctgaccttaaaatagattatccaggtgttcctgactgaattagatgagcttaggacagaactcttcttggggagagacttggagcagcatgaaaaaggttcaatttaagggagattctccaccgctggctttgaaggtgaagtggaccagctggcagggaatgaggacagtctctaggagtggagggcaacccagttgataaagaataaagaaatggggacttcagttctacaaccacagagaactgaatcctgctgcaaccacacgtgaacgtggaaaaagacactgagctccagatgagaacatggcccaaacttgattttagtcagatgctgagcggtgaacccagtcatgccatgctcagaattctgccctacagaaccgtaagctaatgaacaggtgttttcagtagctgagttacactaattcactacagagtagcagaaaacaaatgcatgtggcagggtgtggtggctcacgcgtgtaatcccagcactttgggaggttgaggtgggcagatcacctgaaatcaggagttggagaccagcctggccaacatggtgaagccccatctctactaaaaatacaaaaattagctgggcgtggtggtgggcccctgtagtcccagctactcaggaggctgaggcacgagaattgcttgaacctgggaggtggaggttgcagtgagccgagatcatgccattgcactccagcctgggtgacaagagcaagactgtctcaaaaacacaaaacaaaacttgaaggtgtagtccccaaggtccctttcaagggatcctttcctggtactttatggttaaaagccgaaagcaatttctttctctaagctcctgcactagaagccaacatgtctctattcgtacaacccttgacctcagctgacagtggacaaagagctgcggtatgtcaggctggagggactttgtgttatttttttttttttttgagatggagtcttgcactgttgcccaggctgtagtgcagtggcgtgatcttggctcactgcaacctctgcctgccaggttcaagcgattctcctgtctcagcctcccaagtagctgggattataggcacatgccaccatgcttggctaatgttttgtatttttagtagagatggggtttcaccatgttggccaggctggttttgaactcctgacctcatgatctgcccgcctcggcctcccaaagtgctgggattacaggtgtaagccaccgcgcccagccctgctggaaggaactttgtacatccaaccttcttactacaacaccgaggaaggtggttctcagagagggacccagactgggctgactcatctctagcatgtagtccagggctcttcccataatatcccactggggaaagatagaatagggaccacaggatgaatttacatttgcctaagttggccagttagcccttaaaatcctatcacgtacccagagaagagtacaataattgtgcttatgagtcaaaaccaaagagaaccaggtgactttgtaatatcatactttatgcttattgcctgggtaaaattggcttggtgagtcaaatagacttagacctctgcttccatgattcaggacctggtatcgcccctttctatccttccccacatcatctgctgataaacccttccatgtatccaccctaatctgaactctgttaccttgcttcattgcaatattagattcatccttggaaaatgggtttctttgaaacttgctgaaaggtatcatgtacagcttctatacatttaggtgttttttgtttttttttgagatagggtctcactccatcaccgaagctggagggtaatggtgagactatggctcactgcagccttgacctcctgggctcaagcgatccccacctgagtagctgggactacaggcatgtcccatcacacctggctaattttttgtattttttggtgagatggagttttgccatgttgctcaggctggtcttgaactcttgagctcaagcaatccattcacctcgaccttccaaatgctgggattacaggtgtgagccaccaagcgttggcctacacatttagtttttatgcatattccttctctggaaatttcatacctgctacatatgaaacattaaggttgagaaaagagagggacttatgtatgccgcactgactgaagtaaaaagtggaagatgtagtgaagtggatgaagtgagggaatgaagtgaaggcagactacgctttattacagaaacaccaaaagaactccttttgctctttctataaagtgcatgtgtgtctatataatttatcattatgtccatttgtgataaaatgactagctttccttgatacaggacaaacttgctgtgacaaagctggcacaaactgcatcgaaggattctgcaaaggaacctacaagccattctggcttgttcccatgaaattcacattaattatgctcctttaaatggaaaaaggcaccttaaagagatccaggctgaggctcatattatttcaaacccaaactataacagaatctagtaaataagagcatatatctgaaattatttggtagaaaagattagtcaagttcaaagtccatttctgatacagataaagcttgacttttcactctcagtcaatgctcagtaataaatgtgctaagaaaagttagtttcttctatcatagttcaagtaccaatcatttctttcaacaagatttcatttgcaaagtgaaaaaaatacacctggagctatagctatgaataagtgtaaattttcagggacaagaagcttgtttcctactttgctcttccataaaccatctagtggtaagtgctgagaaatattcactgcattctaatatgagacagatttgtgtactacttgacatgcatttgagccataagcaggagttacctggaaacaaaaaacctggtctctaatgcctgagatgccagagaaacactcaccatcagtcctatccaccatgactgtgtggcaaactgcgagcaagaagaagaactgtcgtacttctggctctttccctgactggatttgctcaataagatagtggtcataaaatgcaagcttcccatcagcatatgtattccagctaaaatcaacttgctgaaagaaatggagaaaaacaaaatatgattttataaaatatttttgacttaacaaatgacatgaacttttcttcaaaggcaaggtttcaattatgcaaaaaccaccttaggattttagcacattcttaaatgtcaagaggctcacaactgtcttaaataaaaagctccccccctttttttttttggaaacatatatgaccatatatgggtctcactctgtcacccgggctggagtgcagtggcttgatctcagttctctgcaacctccacctcctgggctcaagcaatccttctgagtagatgggcctacgggcatgcaccaccatacctggctaatttttgtatttttttgtagagatggggtttctctggtctcaaactccttgactcaattgatctgccaaacttagcctcccaaagtgctgggattacaggcatgagccaccatgcctagtcaaaaggtactttgtggtggactaaactatgttcccccaaaagatatgttgaaattctaacctctggtacctatgaatgtgaccttatttagaaacagggtctttacagatgtaatcaagataaaatgaggtcatactcaattagggtaggtcctaatccaatgattggtatccttattagaaggggaaatgtggacagagacacacagacacacgggggacaccacgtgacaacaaaggcagagacacagagttgtgtttccaagtctccaagccaaggaacaccaaggactgtgggcaaccaccaggagcagggaagaggcaacgaaagagtcttccctagaccttcaaaggaagcatggccctgctgggaccctgacatccccagcatcccaaacgattcttcggcttaaaggtcttacctctattttgttgtggttgtgttgagaggcatcccgatggtcccctgagaaacaaacaggacaaaacaaattgattctacacctatgtccagaggcccctccttacctggctttgcttatatagtgatggtggtaagaccatatacggcctggacaggctaaaatatttattatctggcactttacagaaaacgttagatgacccctggtctagatattcaaataccagtggctgtccctctccactaccttctcctaggggcctgaatcatatcctttgaaatgctttacctctcccaagtcagaaggactcacatatgtgagccacgtcctcagcccctcagtgccctaccatcttcactgatacttcttatgagaaaaggcactcacggtgcctacaagtaggaagtatatatgcatgtccctatatcattttaaacaattgtgctattaagtatatttaaaatagcactctatttgaatctagtattagccttaatattatctctaaatttacataaaattaaatttctaaatgtttcagaaaattagaactgaaatcaacttttaaaacaattggctgggtgtggtggctcacacctgtaatcccagcactttgggaggctgagatgggctgatcacctgaggtcaggagttcaagaccagcttggctagcatggtgaaactccatctctattaaaaatacaaaattagctgggaatggtggttcatacctgtagtcccagctactcgggaggctgaggcagaagaatcacttgaacccggaaggtggaggtttcagtgagccaagatcgtgccactgcactccagcctgggcgacagagtgagactctgtctcaaaaaaacaaaaacaaaaccaaaaacacaattgtaggccgggtgtggtggctcacgcctgtaaccccagcactttgggaggctgaggcagatggatcacttgaggtcaggggttcgataccagtctggtcaacatggtgaaaccccatctctacaaaaaagcaacaacaacaacaacaaaaattagccaggcatggtggtgtgtgcctgtaatcccagctacccaggaagctgagggaggagaatcatgtgaacctgggaggcggaggggttgcagtgagctgagatcgcaccactgcactccagcctggtgacagagtgagacactgtctcaaaaacaaaaacaacaaagaaaacaaacaattgtagtgaaatacacataataaaatttaccatattaaccgattttttgtttgatttttttgagtcagggtttcactctgtcacccaggctggagtgcagtggtgcaaacccagcccacaacagcctcgacgtacccaggctcaggtgatcctacctcagcctctcaagtaactggaactacaggcacacacaattttgctcactgcaacctccacctcccgggttcaagcgattctcctgcctcagcctcctgaatagctgggactagaggcatccaccaccacgcccaggtaatttttgtacttttagtagagatggggtttcatcatattggccaggctggtctcgaactcctgagcttgtgatccacccacgtaggcctcccagagtgctgggattacaggcatgagccactgtgcccggccagagatggggttttgtcatgttgcccaggctggtctcaaagtcctgggctcaagggatgtgcctgactcagcctcccaaggtgctgggattgcaggcgtgagccactgcacaccagtcaaccaatttttgttgttgctattttgagacagggtcttgctctgttagccatgctggagtgctgtggtgtgatcttggctcactgtagccttcaactcccaggcttaagggatcttcctgcctcagtctcccaagtagctggaactataggcatgcagcaccatactctgctaatttttaaaaatttttgctttgttacccaagctggtctagaattctgggcctcaagcaatcctcccaccttgacctcccaaagtgttgttattataggcatgagacactgcacccagcccattttaaccacttttaagcatacagttcagtggcatcaagtatattcacactgttgtgcagctgtttcatcttgcaaaattgaaactctgtacccattaaacagtaactcccaattcccctgactccagcccctggtaaccatcattctgctttgtctctataaatctgattattctaagtacttcatataagtagaattatacaacatttgtccttttgtgactggcttacttcacttagcataatgtccttaacccatttatgcctagtgttccattattggaacgctaagcatgtgggagttatttatatcctactgctcaaggtcatcaccaagttctgattgcaaaaattcaaaaaattgcaacctctggcataaacgagttcaggttcatctgtgttgtagcatgtgtcaaattttccttcctttcttagactgaataatatttcattgtgcgtatccacattttatttatccattcatccattgatgaacgcttgggttgcttctatcttttggctattgtgaataatgctgctatgaacataggtgtacaaatatctctttgagcccctgtttcagttcttttgagtatataacctgaagtggaattgctagatcatatagtaatgagacttctaattttttttttttttttttttttttttagacagagtcttgctctctcaccaggctggagtgcagtggtgtgatctcagctcactgcaacctctgcctcccgggttcaagcaattctcctgcctcagtctcccgagtagctgggattatagctgtgcgccaccaccacacctggttaatttttgtattattagtagagacggggttttgccatgttggcaaggctggtctcaaatccctgacctcttgggatctgcccacttcaccctcccaaagtgctgggattacaggcctgagccaccacgcctggctgtgagcccacttctggccactgtcctctcccacgcatgtgtccccagtgctgtccatggtgctcctctggtgcttagctggagaatggccctagcagcaggactctgcatcgagagggcaccagcaatgccaggagacaggctatagtccaagtaatgacctgcacacggcaggcagccccactcacccagaaaatgagtgacggcttccacttaccatatatctgcccgttgatacagcactttttaaaggtcatgatattttgtgtgagtgtccccgtcttatcagagaagatataatggatctgcccgagctgttcattgagtgtggtggttctagcttttgcgggtgtgtccttctcagcatagtacatttgcaggtcccagttgatgaagtgactctgtccaagacgaatcacttccacgctaggaagacagaagattattttccgtagagagctcggatacgagtggcaagtagtagagattttattctcattgtacagacgagagcaagctgcttatttactgctatggtctgaatgttagaatccccctccaaattcatatgttgaaacccaatccccaattcaacagtattgaggtggggcctttagaaggtcattaggtcatgagggctccacccttatgaatgggattagtgcccttattaaagtggctcaaaggagcttgcttgccccttctgccatgcgaggacatagctagaaggcaccggctgtgcctataaagcagaaagtgagcctttgccagaccctgaatctgccgatgctttgatttgagacttcccagcctccagaactctgagcaataaatttcgaaggtcttttgttatatcagcccaaactaagccctctacaaggagacaagcccatgcactcagcctctggtttctcctaaccacatgcatcattctcaggcttcagggtcaagctgattttagacaagtaatttccactcaaaattgctcagtgagatttcccactcactcctgggcacatttagccaaggcacccatgttcagaatacacagcccagcagaatggaagacacagcaacactgcagacagagcagtggacacagcaagcttgactcttcccccattccccatagcacccaggggcactggaatggccatgttcacctttgccctaagtggtagggcagagggagtgagagtaccctagggtacagactccactgtgctctcaaacagggcaaaaggcttttggcaaataccccaaatcatgatccctaaattatgataaggttatagaatatccaaaataagatattataaaaggatcatctgaattttaaaactataagggacattacctatctcagttataaggaagctgtttacatagccagcaattgttaggtgggccaaggaagtccttaacaagttaaacagatggaaaaatgatgctctccccacttctctcccttccgtaagtatttcctaagtgcctactatgtaccagataccattctaggtgcaggggacatgtctgtaaacaaaacaaagtcctttctcttaaggaggttactttctagtagagacagacaaataaattaataaagagaggctctatcagaggtgaaagttctctgcagaaaatcaaagcagggggccaggtgtggtggctcacgcctgtaattccaacactttgggaggccgaggtgggcggatcatgaggtcaggagttcaagaccagcctgaccaacatggtgaaaccccgtctctactaaaaatacaaaaattagccaggcatagtggcatgtacttgtaattccagccactaaggaggctgaggcaggggactcacttgaacccagcaggtggaggttgcagtgagctgagatcgcgcgactgcactccagcctgggaaacagagcaagactctgtctcaaaacaaaacaaacaaacaacaaacaaacaaacaaaaatcaaagcaaagcaaggtaaggagatatgaagatctccaggaaggagaagtggtcagaaacagaatgagtcaggaaaggtcagggtaataaggtgttgtctgagtaaaggcctttgtagtgaaaggggagcagatagatacctatgtaaggaatgcccctggcagagaaaagagcagggacaaaggccctgtgcaggaagaatatcaaggggccagagtggcagaagcccagggaggtgggctgaggtgcagaaggtacgggcggagtggaaggctgagcaccagatcacacttggggccctggggttgggtttattctgaatgaggtttgaagtcaaagcagagatactatctggaagaacttgctccagcatgttttcaaaggacctttatctccaagaaaaaagaaatcgtatttgtcacatgacatacctttatataaaattatgtatacagtttcttttataatacacattgatggttttaggcaaaattatctatgtaatagttcccttgacaaaggtaacactcaactcggtttttctcaaagtagctgtggaacagatggctgccccagggctttccttcatgttaaaagaacaacagtaactacatgtaatcaaattaaaaataaagcaaatgcacatataatgacactaaaataaaataaatgcctctaattataggtgtgtatgtgattcctatgtctctgggctattctttatcagaactaagaatgaactctggctgctgggtttattccaaagcactatccctcccaaaaaggtctcaaagtcagtttggccaagggcagtgaactttcatattaaaaagagaaaaaggccgggtgtggtggctcatgcctgtaatcccagcactttgggaggtgaggtgggcagatcacctgaggtcaggagttgaagaccagcctggccaacttggtgaaacctgtctctactaaaaatacaaaaaagtagccagacatggtgatgggcacccgtgatcccagctactcaggaggctgaggcaggagaactgcttggatccaggaggcagaggttgcagtgagcctagatcatgccattgcattcctgcctgggcaacaagagtgaaactccatctcaaaaaaaaaaaaaaaaaaagtaaaagtaaaaaatgaagaagtatcaccaaatcagctgcttaccacttatcggagatatgcccctgactttgttgttgtggttgagatttgagatgaaaaagagaacattttgagaggttgatgaaggacagggagtttctttcctactaggaggtagtggccggaaagcacaagttctccaccttgggtgtggcagatgataataaaggctcagataagaggtgaggaccacttccaaaagggaaaactaagtttttccatcacctgctaaatcttcccctcctcccagtccctttctgaagtctgggctttggaacccggtgagaagggaaccttactaataagacaatgactacaggagtagcaatcgatctttgaaattccctacccttatctgcaaacaggatgagataaaaggtgcctggcacagagtggatactcaaatgttaatttccttttcctctcttaccctcaattctgaaatgaacgtgattttcttacctgttctttgtgacctttgaaacagtgatcactagaaatgaaggcactatgttgggagaaggtacaacattcttccattaaagcaaaatgccagagaggacagccttacctgacatagagagagatgggtaccatggtgttgagaacaatgatatagccccagaaaatgaggaatccacggtaggagggtgtatcgtcttctccatcatagaggtaccaagaggaattgcccacctgtgcttcccaataagcatggccgatggcaagaccagcagaaagcagaataagaacaacaaagatctagaagacagaaaacatttaaatgcattctgaagatggatttccaacctcttgcatttcctagatgctaattaaccttactcaatacttcatatgattgagaatttagtagtctgaaaaataatatatgtcaaataaaaacagcactatcataacgctttgaaagtctatttgattgctgcaattgactgatgtatcctacatctcccatagaaggtaaggttttgttcccaaaattatctctccaaagagaaggtggtgtcttatattcaaatccttgaagaatcttatattacagggcattctctcaattacgtttactttgaacaataacatactgtttggggaagatatcttacttagcatgaaacaacttccaacaaggctgaactggaaaactggaatgcttatagaagatattcaacagatttttttttttttttttttttttttttttagacagcgtctcactgtatcacccaggctggagtgcagtggtgccattgtggctcactacaacctccacctccctggttcaaacaattcttatgcttcagcctcctgagtagctgggattacaggcacgcgccaccaaggccggctaatttttgtctttttagtagagacgagtttcaccatgttggccaggctggtctcgaactcttgtcctcaagtgatctgcatgcctcagtctcccaaactgctgggattacaggtggccctcacccagccagaatttttttttcagggcaagaaaatttcacctatatttgggcgattattccttaaggtgtaatgtcataagtattgcatgacattgtaaaataagatcacttaagaagcaatatgataagtattatgttgtagaagttatgagcatatatttatggaaggaataaaaagtcaaccatcctagtggtacttggagattcgcaagtgggaataaaatttccagagacaaatttaaatttctggacatggagtccaaaagtgctatatctcacaactttgtcgtggaaagagcagagtgccaaacaggctctttgagagtggataaccacaaccatgacaccaaagatgaatgtgaaaagttcaaatacaattttcatgaaatgagaaagcaggggaaaatgtttcttaaattattatttttatgtgattttaaacatgtatatgcaatcaaagaataagttttagaagtatgcattcaaattgaattaaatacttgaaaaaatttttcattgggaaatagaaggagtgcttaatatttggggtcaccacgtgggcagaaaagagcaaacatagcaggtctgagactgcttcctccgaaggccggcttgcaaggttcgccctgggctggtatctggtaacttagatgtttggaggatttcccagttattttttattctctgataagaatagctcatgggccgggtgcagtggctcatgcttgtaatccaagcactttgggaggccgaggcaggcagatcacttgaggtcaggggttcgagaccagcctggccaacatggtgaaaccccgtctctactaaaaatacaaaaattagccaggtgtggtggcaggtgcctgtaatcccagctacttgggaggctgaggcaggagaatcacttgaacctgggagacggagattgcagtgagccaagatcatgccattgtactccagcctgggcaacaagagtgaaactcaatctcaaaaaaaaacaaataataataataataaaaaaactcatgatgcctaactgtgcaaacagcatggtttatgctgaccatctgcattcttttggggagtctagagtttttttgttaaaaacctttgacactgagtctctcatgagcttccctggtatagacaacatttcacatgtggtgtcattaattgctgctgggagaattaagtgcctattgtgtgtgtggtttggtggggagtgggggcaggacggccgacttttggaagcttgtgcctggtttcctttgcactttgctccatgagtctttggtgatcttgctctgtgtccttttgttgtaatgactcacagctgtgaatacgactatgtgctgaggcctatgagtccttccagtgaatcatcaaacctgggagtggtcttgagtgtcctcgacatactttatttttagccttgccttgtatttggagctatacagtatatgttgggggtgctgggggaggcttgcttctaagagaactgcctctatgggaaagtaacagcaatgaaatcaaccctacattgacttcaggagtccagcttcactaatttatctagggcttcctggttttccagttcccgtcatcaaagcactcagggcaccctacaaccgaaatttcccttcccaagggaattctcctgttaaaagtgtggcatttctgagaaaaagtaaggcatttctggaaaaaaaaatcccttcttcctgcatttgaagcttggagtgcccaataatttttctattccacctaaagaggtaagattttgtattagaaaaacatacgataatattagtgcaaaagacagcaatctagatgagagatctactgagatgaaaaataaataccgtgtaaaccatgtagttcatcaagtaatcaattttagttcttttaaatctggttttcccactattcttcattattttagtgtcagcacctgaaaatggaaaattcaatgtagtcatcagttgggaaaaatcaattcactagctcaccaataaaattactcttcttggccaggcatggtggcttacgcctgtaatcccagcagttttggaggctgagttgggcggatcacctgaggtcaggggttcgaggccagcctggccaacatggcaaaaccctgtctctactaaaaatacaaaaattatctgggcatggtggcacatgcctataatcccaactactctggagcctgagacaggagaatcacttgaacccaggagacagaggttgcagtgagctgagattatgccactgcactccagcctgggctacagagtgagactctgtctcaaaaaaaaaaaaaaaaaaaaaaaaaagctcatgatgctattactcttcttttggttttgatggacaaaggacagaaaagcaatcccctctaagtctttaaagatcatagctgattaatttcccaagaaactctgaacgtacctgcaaaaatgactaagccgtggcagaaatcggtgttcctaattacacagccacgtaacaaaattttatcagcatccaaaggaaaacttgtgtttctccaaaatagtgttcctgtaaacttatctagtctgttattgggttcttcacattcaataaaaccttttaaaaatataagattcacataattaatcacatacaaaagtctttctggttttaatcaataggaattgaaccaagcaactaaaatttaaagcaaagtaagacatgtttggtacaaaccatcaaatgtagccaatgtatcttctctttggaggtactggtctgtgatttcaagtgacatcttaaattttaaattggtttctctaaaggaatggggaaaaaatgaattaaatgaacaaatttttgagttcaaagtggaagttaatcatccaaagttacattagccatacctggacatgaagcctaaataattagctgtttctattttcaaactctgttcaccttggaacttcaggtttggaaaaggttatcccctgaagtcgagaaaatttctgaccttgggaaatgttggttcccttcactgtttgttgttgtgaaggttaggacagaggtacccacaaacatccttctcattaactttaactttaccatcagctaggactaccaaagtgctgtttgaaaatgtagtgtctaatatttaatcacattaaaatgattctataacacatatttgttacagaaattctgtttcgcctctgtcaaattcttttccagagtgaataactggatcacatgtttttgaaagacaattttatttggaaaaggaagtcttagctttactcccaactgccccaccatagtgcaaggtaaggtcgtgggtgggcacaagggcaggccggggcaggtgctctcaagggtgaggctgccgtctcacgactgaaggctttatataggattcacgaatactcaggaattttccctagggaagttcattctcaacctcaccattctgttctggcagggcatgttaggatcttatgtctttgtaaagctttagaatctctcatggaaataatagcagttttatagttgagaataaacagtcgggcgccgcggctcacgcatgtaatggcagcactttgggaggcagaggcaggcagatcacttgaggtcaggagtttgagaccaacctgacaacagaaagctctatcaggcaactgcccataatccaatttgggtatagcctcggggccttaaagagaatgcagtgtctttgtcagttaagcctttacaattaagaagtggttaattggtttttaaccaattagcctgtacaattaagaagtggttaattggctttaagtatttttttccgccaaaaaaaaaaaaaaagtgtgatagatttccaacagtcaattgcctgatctatgaagcaatgacagccctagttttcagtctcatgatttccgctctctgtaaagcagtgtatgcacatctggagcgtgaggcgcgaggagcagagggagcaatgtcccgactctaccacttactgtgtgaccttgggcgggctgctgcacctccctgggcctccgattcctcatgggtaatacagacgaataatattcgtctcacatggtcgtttagaggattaaatgagctaatatgtaaagtgccggcaacctcgtgagcactcaataaatgccttgaaaactggtcagaaaactggtcaaaaacagaacttcattctcttttaaatgatagcatagtaaccaaaaccaacacaaggagaattcaaaattgcctcctggggccagctgctgtggctcacccctgtaatcccagcaatttggcaggccaaggtgggcagatcacttgagatcaggagttcgagaccagcctggctaacatggtgaaaccccatctctactaaaaatgcaaaaattagctgggtgtgggggctggagcctgtaatctcagttactcaagaggctgaggcaggagaattgtttgaacccagggggtgtggaggttgcagtgagctgagatagcaccactacactccagcctgggcgacagagtgagactctgtctcaaaaataaataaataaattgcctattggtaaagactttaaaaatctgttcctttctctgacacagataataacctcgatattattcatatctgtctggacgctgctcagcagttgataaagggctcagacacatatgctcctgtctgatccttttaccttccctgagaggtggagaaacgcaggtagtaagagctccacttcacagaggcgcaaaggtgagatcagtagggacagcagcaggtggcagaggcaaggccagatatcaagccgtctggtccacaatgccccgatttcagtggaatgaatgtgccttcaaaggccagctttaaatcaggcccatcgagacacacttacccatccagttctgctgtttccacatagcagaggctgttaggctcagagctagacagcaggagaatgtcagcctgtccaaaacaaaacacacaaataacaccgagaccctgagggaaaagccgagcacaggggctgggggagaacaaggaacaagagaagcagaatttgttcacttactggaacaaaatcattttttttcagacgaatgacgtctccaacttgaatttctttccacttagcaactttgaacctaaggattaaaaataatgaggatttattgacattttaagttacaggcaagggaattactattctttctggatgttatagattctggaaaatatgcaagtcacagagaaaatgctaaaattttgctctttaatggatgtaaacatattaaaggggggcatgaaaattgtattgacctctgaaggaagcaatgatgaatgactttgatacattcttttcatctaggtcatgtaaggaagagtttatgggggccacttatgtgcgtggcagggaaatacttgccacccccttttgtttttgcttatgtccaacttgcctccctgctgtgttccttctcagtgacccatcacttgctccatgctggtcccaggacagaagcacctacattatggcacccacctgggcctcccagagtcttcgtggggcttcagagcttgcctactctctgctgtttaaattatctttattatttatttattaattttttttttcattgagacagagtcttgctctgttgcccaggctggagtgcagtggcacgatctcagctcactgcaacttctgcctcctggggttcaagagatcctcctgcctcagcctcccgagtagctgggactacaggcacgtgccttcacgcctgactaattttttagagatgagtttttaccatattggccaggctggtctcgaactcctgacctcaggtgatccacccacctcggcctcccaaagtgctgggattataggcatgagccacctcacctggccggttaacttcttaattgtaaaggcttaactgacaaagacactgtattccctttaaggccctgaggctacactcaaattggattatggtcagttgtctgatggagctttgtgttgtcaccacaacttgtgtttacacagccccttcagcctccctagggcatcattttcagggctttgctcacgtcttgacatctttccccacattccctcgctaaagtgaattttcccttccctgtactgtcagagcattttgtttttatcttttttattctgatatggattttattagaatgatgtgtgtaggtgtctcatcttctgtcttgaactataaatttctcaaggatactgtcctgcctccaacatgcagaaagtactccataagtgtttgttaaattaacgtagtcaactgtgacgaaagcaccaactcagggatcagtaatgagttgttttttgagcaggaggcttcaggcagaactgcaaattcaagtgctaaaaatagtaactaaggcctcattccaagactttttatgtgtcaacactgaggaaagtaacctgacttacagccgtacttccactctaatgcaaatatagactataccaagctataaatatgtttagatggctttttttcctttgcaaataagaaaattatgttccaaagttacctttcaagtgtcaaaagacaaaatcacaacaatttaaagatcttaattggctttatttacaattctaggattaggaaacacttcattcagtaaaatagaataagtgtcccaatgagcctagcagaggaggttgttgttgttaagacaggagtctcggccgggcccggtggctcacgcctgtaatcccagcactttgggaggccgaggtgagtggatcatgaggtcaggagattaagaccacggtgaaaccccatctctactaaaaatacaaaaaattagccaggtgcagtggcgggcgcctgtagtcccagctactcgggaagctgaggcaggatgctgtgaacccgggaggcggagcttgcagtgagcggagatcgcgccactgcactccagcctgggcgacagagcgagactccgtctcaaaaaaataaaaaaaaagacaggagtctcactaagttttccaggctggcctcgaactcctggcctcaagtgatcctcctgcctcggcctcccaaagtgctgagattacaggcgtgagccaccgtgcctggccaacccatatgtttagcctgtaccatacctacctacactggtaaagaggagctctgggttgccttgaatttggaagtctagggtgcatgtctggcagggccatggcctgagcagcccctgcagtggggtcacacctataggaacttgagcattagcagggtagagcacagggggcctcctcagaggaaactggaacatcggatagaagaatctaacagaattgcctccaatatttcagtattcagaattgccttccagtagccctgctaagaaggtgctggcctatccatttgtcatttcggacttacatgcaaatttctattttaaaatttcagaaatactgaaatgtaaaacatctacaatttcgtcaattgaaagataagccaaattttttttttaatgctggagttaagaattgtatactaaattcattaggggaactggggcataaacatatatttaaaaagtattttaaatctccaagtcatttttggccataaatgaatggcagataaacacatagtgattagacgactgcctccagtgaaattaagtttattatttatagcaggttcattacgtccactgggtatatcatttgtatatgtgaaaatctttaaaacaatattatagtttaaaacttttaaaagtgttgatatgttaaaaattttaatgaatatttcctatggaatttagtactcaaaatagtcatctttttatctatttttatcactatccttattagatttattacaacaggggtacatactcattaaaaagataatttaaggccaggcatggtggcttacacctgtaatcccaacactttgggagatcaaggaggataacttgaggtcaggagtttgagaccagcctggccaacatggtgaaaccccatctctactaaaagtacaaaattagctgagcatggtggtgcacgcctgtaatcccatctactcggaggctgaggcaggaaaattgcttgaacctgggaggtggaagttgcagtgagccgagataacgctactgcactccagcctgggcgacagagcgagactctatctcgaaaaaaataaacagttaatgtactaatagccttctacattgtaataattatctctgaatgtgtttctaggcagagttatgcattacatccttgaaactcagttactaattagacacagtacctgccatccttaatgacttcacacgtcctattgttgatttccttatccattttatggcgagccttgagaaggaagatggggaaatgctgttttaaacatctcaatagagaaggaaggcacgagaacttaaagtcaactcaaagcaatgagtagaacgttgtatgagaaatcctcaccacatcgtccaccaggtctttgattgcagtgacgcccagcaccacaagcaggggcactagtgtggtgtaccaagccagggtagagatttgaggaactgcctaaaagaataaaagggcttatgtgtgtgtccatgaaggcatatcaagcttacaggtaacttattgctaattctaagcttgctaattccaagtctcatcaccgtcatcacataagtctacatcctgcagagtatataggaaaggctcttcaagcatttggacaacctccttctagtggttctctctagcttctggatacctggaacagagcctagagggcagtggctcctgaaattatctcattgcaaacttaactggacaccaaggaagttttgtattatgatacctaaaaaagagttgctctaaatcttttgtgaaaatcatatttaactgggggtgagggggtaggagtggcaagggagaagtctcgtcttaactttttttttctttttttttttttgagacagagtctccctctgtcacccaggctggagtgcagtggcacaattttggctcaatgcaacctccgcctcccaggctcaagcgattctcctgcttcagcctcctgagtagctgggattacaggtgtgtgccaccacccccggctaatttttttgtatttttagtagagatgggttttcaccatgttggccaggctggtctcgaactcctgacctcaggcaatcctcctgcctcagcctcccaaagtgccgggattacaggtgtgagccaccgtgcctggccaaagtcatcttaacttttaaggaatgcatgcatagtaggttctatactgcaggtttctcagtcagtggtttctgaggatcccatgctgaaggcaatgatggcaagaggtactagctgcctctgaaagtgagggattagggagagcatctctgagggcattagaagaaagtgcttccttcatgatcatcactattggcctatccaagaaagtgagctggccttcctccatcaagacagcctctaagtttgaacaaagattgggatgcaagtttaataaagttatttcataaccatcctcctgatcactgggctgtataatgtagtggttaaaatgacaggctttggagtcaactcctagatccaagtcttggtcagctctatcatttatggcttatgggactttgagcaagttactttagcttactaggcctcagcttttctctgcaaaatggaggtcatgccaggcctgaccttctagactagaagaattaagtgtagtgacaacacaagttaagaagctgcctacggctattactgttaccctaatttggattgctgaccttaagagaagataactgcgccaggcacggtagctcatgcttgtaatcccaacactttgggaggccgaggtgggcggatcacctgaggttggaagttcgagaccagcctgaccaacatagagaaacgccgtctctactaaaaatacaaaattagccaggtgtggtggcgcatgcctgtaatcccagctactcaggaggctgaggcaggagaatagcttgaacctgggaggcagaggttttggtgagctgagatcacgccattgcactccagccttgataacaggagcgaaactccatctcaaaaaaaaaaaaaaaagagagagagaagataactggggtgcagttagaagacaaaaagatccttcttcccacatcacagtgaatatgtgaaactcctcttccctgctagaaggaagtaagggaaaatggtctacttcctacagagcagcaccttggagtttgcagtgctaacctctacacacacctttctaagcatctcctttgataacagggccatcctttactatctgacttgaaggtcttacagtttcctaaatcattgcctatccatttctccttaccatcgtctcttctttttctctcctctccacgcatcctccatccccacctagacacacattctaccccattttcataaaaccttaaagggtcaatcccagcaggtataacttttccaaatccaatgcttgccgtaaagaatctgataaagtgccgggcgcagtggctcatgcttgtaatcccagcacttggggaggctgaggcgggtggatcacctgaattcaggagtttgagaccagcctggtcaacatggtgaaaccctgtctctactaaaaatacaaaaattagctgggcgtggtggctggcaactgtgatcccagctactcagggggctgaggcaggagaatcgcttgaacccaagagaaggaggaggaggttgcagtgagccaagatggtgccactgcactccagcctggacgacaagagcgaaacacggtctcaaaaaaaaaaaaaaaaagaatctgaaaaaaccaggtggatattctgagcttaagctatgtaatccgcacggcagacactaaaggttgattctggcgctaactagtgtgtgtagagttccctcggttacagcaacagttcttgcacagctaaactcatgctctctggataactggatgctttgccacaattaggaaaaaaaatttttaagtaggccttttaaaatgtaaaaacagttcacaaaaataacttactgaaatttatgaccaaaattttaataaaaaatcaatgatctttttgggggggaaattcagcatctaactacaatgataaaagacaagcacaaaatagctttaattttaaggtgcaaataattttacaaagtaaggattttattttatttttttttaagatggagtttagctcttgttgtccaagctggagtgcaatggtgtgatctcggctcactgcaacctccgcctcctgggttcaagcgattctcttgcctcagtctcccgagtagctgggattataggcatgcaccatcacgcctggctaattttttgtatttttagtagaaacggggtttaaccatgttagccagggtggtctggaactcctcacccgaggtgatccacccgcctcggcctcccaaagtgctgggattataggcgtgggccactgagcctggctggattttagttttattcacttcagggataccaattttaacacccatatcagtataacatgaaattttttaaaatacagaattagaataatatttccatttgctccctttccctgttcatataacactgattgagctggttctgtgtatgaggcactgttcctttatgtacagaaccctgatgctaatataaaacactttcaagattattcacattatatgtgtctacagcttaaatgttatcgagtcactataattcaaacagatttaagatagcaaagggcattacctgtaagataagaagagccaggaaatataaattggctgctctcttaaactgctcaaacagattcattggtataaaggtaaatgcgttgtacttgtatgttttaattgcattattctgttggaaaaaataagagtcattctaaatgatgctgtatttatcacaatgtatacacatctgcaaaagtcacaagtcccacagcttacagtgacaaaggaacatcatctgtcagaaagatattgaggattttgtctgggtgcggtggcttatgcctgcaatcccagcgctttgggagaccgaggtgggtggatcacctgagcctaggagtttgagaccagcctagccaacatggtgaaaccccacctctactaaaaatacaaaaattagccaggcgtggtggcctgcacctgtaatcccagatacttgggaggctgaggcaggagaatcgcttgaaccagggaggcagaagttgcagatcgccccactgcactccagcctgagtgacagagtgagactctgccttaaaaaagaaaagaagaaagaaagatactgatatttcttttaagcttttaattctagccaagcagccaagcctcaaaatgactacttggagtcttatgacagaggcagtaacaagaaacagacatcagactgtgaccaaataaatcctgctgtcagattccttgacccattagagactgttagaaaacagggtaaaggtagacaacaacatggccaaagccaggaaaagtgaggcttttatttaagtgaggagacagagcctactatgtaagaaagagcaaaaggtactgtagtgggttgcattgtgtcctgcaaaagatatgttcaggtcttaacactaatatctatgaatgggatcttatttggaaataggatcttcgcagagataatcaagatgaagtcatacgtgattaggacaggctctaatttaatgaggtgcttattcggactggggtccctataagaggaaagttgcacacagacacacacaggaagagtgccccttgaagatggaagcagagattggggtgacttcatctgtaagccaaggaactccaaggattgccagtggccaccagaagccaggggagaggcagggaacagattctcctgcagaggctccagaaggagccaaccctgccaacaccaagatttcagacttctgatccctgcatcaggagagagtaaacttctgttgttttaagccatccagttgtggtactctgctatggaagcccttggcattaaaacacacatcttacaacatttaagcccacacttaatatttattattattattattattgagacagagtctcactcctgtcacccaagctggagtgcaatggcacaatttcagctcactgaaacctctgcctcctgggctcaagcgattctcttggctcagcctcccaagtagctgagactgtgggcacatgccaccactccaggctaatttttgtatttcgcatttaatctttaagcattctttatcacattccaaaggtaataagcatttttgagtcaaaaatatgtttaaaatctctaaatccattccaggcagagaaggggaagataagttcttaagagattcctttcaaactcattactttcaaacaggaggcttctgtgccatcattgtatattctttcataaaacatttctaagagagcttaaaatttaaaaaagagagagaaaatttcaatctacataattctgttttgtttcaagtcacccgctacccaccccaaaggtaaacatcaataaaaatgacattctatagaaacaatgatgattatcagtagccccaggcaggtggttacgtggaaggcaggtgtagcatgaaggtagtaagcatgccagctactggaaaaaactgcattttaatgaaaacaattcagaaagttaacaactcaccgcatatttactctccttaatacacaagaattttgtgttcataaagtgaggttgttcgtggtacttgcgatcgtttgctttgacttgccatgtacattctttaaaaaaaagggagaaaagttcgtaagtagcaaattaacatgttgttatgagttgaattgtgtcttccccagattcaaatgttgaagtcctaaacctccatccctcagaatgtgaccttatttggaaactgctcattgcagatgtaatcaaattaaagtgaagtcattagagaggaccctaattcaacatgactgatacctttacaaaaagggaaatttggacacagagatagatggaagacgatgcgaagtcacagggagaaaatggccatctgcaagccaaggagagaagcctagaacagatctctcccttgtagctctcagaaggaatcgatcctgctgacatcttgatgcctcgaggaaggcataagcatgctgctgctatgaaagctggaggcaagcatgctataaatcaggaagaaaatgaggaagcaggccgggcgcggtggctcacgcctgtaatcccagcactttgggaggccaaggcgggtgaatcacgaggtcaggagttcaagaccagcctggccaaggtggtgaaaccccgtctctactaaaaatagccaggtgcagtggcgggcacctgtaatcccagcttctcaggaggctgaggcaggaaaattgtttgaacccgggaggtggaggttgcagtgagctgagattgcgccactgcactctagcctgggcgacagagcaagactccatctcaaaaaaacaaacagaaaagaaaagaaaagagaatgaggaagcacctctttggcaccaagttctccatgaacatgcatgctggatgaagctcccttgagtgacgcacataatggagagaactaggtgttgatgaatccccaccaaattggcagagaagagaaattaacaatgagtgtggcacaactatttttggagatgggaatatattaaaagacacttgaaagtaaaaaattacaaaaatatcagtcttaacaactataataataaagattgtgtgatctcggctcactgcaacctctgcctcccgggttcaagtgattcttctgcctcagcctcctgagtagctgggattacaggtgcctgccaccacacccggctaatttttgtatttttagtagagacggggtttcaccatattggccagtctggtcttgaacttctgacctggtgatccaccagccttggcctcccaaagtcctgggattacaggcgtgagccactgtgcctggcaaaatgatgtattttctagactcctactccaaaggaaatatagacaatatggcaagagtaacaagtgtaggccgagcatggtggctcatgcctgtaatcctagcactttgggaggccgaggtggatggatcacttgaggtcaggagttcaaaaccagcctggccaacatggtgaaaccccgtctctactaaaaacacaaaaaagtaatggggcatggtggtgcatgcctgtaatcccagctactcaggaggctgaggcaggagaatctcttgaacctgggaggcagaggttgcagtgagccgagatagtgccactgcactccagcctgggcgacagacggaaactctgtctcaaaaaaaaaaaaaaaaaaaaaaagtaacaagtgtagactattgaggaatgcaaataattaacctgattgcttttttaaagccacaatatcactattgaacatttttctcgcatcattttggctgcctttcatcgggtaatcataacagttgtgttattacaaatgaaaatgttcctggtatctttgtagctcaagtgcaatcttatcaaaagggaaaataaaaatggaaatataaagccactcataagcactgtaatcacataggcaatcagaacagctcattccactcaaaaaggcgttctcaaagtaggtagataagaccttacataaggtactcttgaatccattctatttggtggtaatttgcaaatgcatgtgcttttaatggtttactttagcacacagatgacttgtgacacatccccaccaccagggttctagaacactgttcagaaccactgttacgcatttcaggaaggctgagaagaaaaacagacaagatttctcaagaagacagaaaaggccaataagggatttttaaaaagtcaattttagaaataactcaagtggaaagaagaaactgccctgttaaggagctggacataatgatctttcccagtccacttctggtccatcccccttgtggctctataaatttgcttcataattaagccaccagctggtggtggctctgtctggtcccagcactataccctcatccctggccaattttgatttggatgattcagacagagagggtggcatcagacctcgagtaggtgcagtgaggggttaccagaaatgaccttgatctcttaattttacacttctgccaatactgtggggagcctggagaaagtaaccagtatgtctttgtctgcaattgaaccgcaaacacgtttttactcaattttagaaatctgactgcagtcaagtaatcaataaccctatttccagttaaagatccttgtttggcctaattcagacaaatcaggggacaaacaaattgatgtctactctttattcatctatgagtttaggctaattgcttgagctgtatttcaatgagataccatgaaaatatgaaaacagagctccatggacagacacacttgcagaagacagcaccttgcaaccctctcttggaagttcggtggatttgcttgtacattaaaggctgtgagaagtcctgtagtaaataaactgattttattttataagttaaatgtttaaaatgctttaatatttaaaatagcttttccaaaattaatataatcataggcactttttaaaaaatcacagaacacttattaacatcagttaagaagtgctgcactgatacacatgcctttaggaagggcagcaaaacagcacgtggaggaattgacctttttgagcaaatatttattttaagtgtctgcttggaacagagaactttactggacacttgaactacaaagataatttacagaaagagtaagcatcttgccccattttctttttttgtccttttttctttcttttttcattttttttttgtttgagacagtcttgttctgtcatccagggtggagtgcagtggtgcgatctcagctcactgcagcctctgcctcccaggttcaagcagttctcctatctcagcctcccgagtagctgggactacaggtgcacaccaccacgcccggctaatttttgtatttttagtagagacagggtttcaccatattgatcaggctgttctcaaactcctaacctcaggtggtccacctgcctcgacctcccaaagtgctgggattacaggcttgagtcaccatgcctggccactttttcttttcttttctttttttttttttttaagagacggagtctcactatgttgcccagtgcctaggctggcctcaaattcctgggctcaagtgatcctcctgcctcagccttcagagtagctgggattacaggcatgcaccacactgtgcctggctcatctcattttctagaatggatatattgacaaagaaaagagaagaaataagaaatgcaaaaaatgcaccttcaccatatggccctttagctaaaagctacaaagctaacaagggtgtgccatcagaactatccatgtacatgtacagagatgattttaacagctgccatgtgacatgtggcttaaagtcaccctgagtctactaaatggttgtgttgtcaatatatctaaatatggctacgtgctctccagagtgttcccatgatcaccacgtcctttgatcagtgccatctggaagagcagatgagtgcagccctcctctcatcctctctgtgctggctccgaacgcttgcttacagacccaccaacaaccaagaagctgcactggttggtacacactgcagcaaacaaggaaaacaagtagataaaaagtccaacatcaaaaagaaaaaaaaaccatagaaacaattgaagagagaatggctaaaggacatgaaaagacagttcatacaaagggaaattcaatgctgttctcgctgaggctggagtccaatgatgcgatctcagctcactgcaacttccgtctcctgggttcaagagattctcctgcctcactctcctgagtagctggggttacaggcgcccaccatcatgcccggctaatttttgtatttttagtagagaccgggtttcatcatgttggccagactggtcttgaactcctgacctcaggtgatctgcccacctcggcctcccaaagtgccgggataatgggcatgagccactgtacctggcctcaaatggctcttaaacctgtgagaagatatttgggttcctaaaagagaaatgcaattcttcactgagatagtagtttttatcctataatagcaaaacattggcacatggtaatgcttgggatgacattctaggttcaaaagagagcagagaaacagacactctgaggtagcctttatggagagtaatttggccagatctcaaaatttaacacacacatgcactgaccaaataatcacacttctaggaaatatcccccatgtacctactgcagggattttcaatgcagccctatttatcagaacgactagaaacaacccaaatgcctactgggaacagccagttaaacacgattacaatgatagcctatgcagtcagcaaaaaaagaatgaggtgaccccataaatatggtaggaattacctccaaattacactgttaagagacaaaagcagaagggtatctaccatcttgtgctttcagctgtgtgatgcatagaattcatacacaatatgaatgcatatatgtacacacacgtgcacatctgtttctgcatatgtgtatgggtatatgaggaagcaagtttgcaagcattctttgcgcatacaaacgtgtatctctctggaaggacatattttgagaaactggtaaccgtaatttctttttgtcatttttttaaaagacaaagtctcactgtggcacctgggctggagtgcagtggcatgctcatagctcactgcagcctctgaactcctgggctcaagtgatcctcccacctcaacttctggagtagctgagactaaagtgcacgccatcgtacctaatttttaaatttttttgtaaagatgaggtcttgctttgcagaccaggctggtcttgaactgctgcccacaagctatcctcctgccttggcctcccagagtgccgggattacaggtgtgagccaccgtgcccagaccagcagtattttttttggaaaggaaactgcatgactgagggacaggagaggcaggaaggaaaacttcattttcattctggacccttttctaattggatcatttacatgtattactgttttaaagcaatgtttgtgattcctctccttccctctattggcatatatatatatatatatatggcgaatatggagaggagcaaggtggccaaatagaagctcgcacgaattgtaattcccataggaacatcaaatttaacaactatctacaaacaaaaaagcacctttataaaaaccaaaaaatcaggcactcacagtacctggttttaactttatattgctgaaaaaggactgaagagggtaggaaaaatagtcttgaattgccaatgccacccctcccccagccccagcaccagatgtgtggcatggagagaaaatctgtacgcttgggagagggacagtgcagcgattgtgaggctttgcactgaactcagtgctgccctgttacagacagtagaaagcaaaagcaggctgaactcagctgatgccagaccatagagggagcatttagaccagccctagccagaggggaatctcctgtaccttggtcagaacttgaattctggcaaacctcgtcaccgagggccaaagtgccctggggctctaaataaaattgaaaggcagtgtaggccccatgaactacaactcttaggcaagtcctagtgctgagctggacttggagccagttgacttagcaggcacatgacctactgagacaccagccagagcagctagtggaatgcttgctcggcccctccccgccaacctcactgctccaaaagagacctcttccttctgcttgaggagatgagagggaggagtaaagagaactttgtcttgcatcttggataccagctcagccacagtaggatagggcaccaggcagggtcatgaggctgtttcaggccctagttcccagacaacatttctagacaatcctggatcagaagggagcctgctgccttgcagggcaaggacccagctctggcaggatccatcacctgctgatgaaagagcccttgagccctgaataaacagtagtgatacccagttaatatccaaggctgtgggccttaattgaggctaagatattctggctttagttgtgacccagcacattcccagctgtggtggccatggtgagagattccttccgcttgagaaaagcagaaggaaaattaaagggtgctttgtcttgctcttgatctttctctttctttctttctttctttctttctttctttctttctttccttccttccttccttccttccttccttccttccttccttccttctttctttctttctttctttctctttctttctttcttttttctttctctctctctctctttctttcttttcagagatagagtcttgctattttgcccaggctggagtgcaatggtgtcatctcagctcactgcaacctgtgcctcctgggttcaagcaattctcatgcctcagcctcctgagtagctgggattacaggcatgtaccaccatgcccagctaatttttaaaaattttttattttattttattttattttattttatttgagatggtttctcactctgtcacccaggatggagtgcagtggtgcgatctcagctcactgcaacctccacctaccgggttcaagcaattctcctgcctcagcctcccgagtagctgggattagaggtgtgtgccaccatgcttggctaattttgtatttttagtagagatggggttgcaccatgttggtcaggccagtcttgaactcctgacctcaagtgttccacccaccttgacctcccaacatgctgggattacaggagtgagccaccgcgcccggcctaattttttttatttttagtagagacagggtttcgccatgttggccaggctggtctctaactcctggcctcaagtgatctgcccgcctcagcctcccaaagtgctgggattacaggcatgagacactgcgcccagcctgccttgcacttgctaccaccttggccacagtggggtaaagcaacaaatagagacccctcttggggtccctgagtctaggccttaggttcttggatgacatctctggacttgctttttgccagaggggagctcactgccctgaagggtgactgaaaggatttaccacaagctgactgaagaggccataggcctttaccgaacatcagcagtaacctggcagcactcctcataggcctgtggtggtggtggacatggggagaggcccctgagcctgtggaaagggcagaatagtggaaaggactggctaatggtttgagtgccagctcagccacagtagaatagataggacaccaagcagatttctaaggttttggactccagtccatggctcccagatggcatctctggatctggctgcagcctgggggaactcactggcttgaagctagcctggctggcttcacaacagggcattgagggaacataggcagccagatcatggttacagtgggccatggcgagacccagtgtggtgccagcttcatgtctgacccagtacattctcagtggtgatggccatattggtgcttgtatctccacccccctagctctgggtggcccagaacagagggagagagagaaggagaaagggagaggagggaggggggaagggggagagagaaagagcaaaaaaagagagagagagagattgattctgtttgggagaaagtaagcaacaagaacaagagtgtgggcttgataatccagataattcttccagatagtctgcaagaaatgcagcgttattgagcttgggatgccccctaatgcagatatgggttcaatcataatatccaagttcttttgaatacctggaaatccttcccaagaaggatgggtataaacaagcccagactgtgagagctacaataaatatctaactcttcaatgcccagacattgatgaacatccacaagcatcaagaacatccaggaaaacatgacttcaccaaacaaactaaataagacaccaggggccaaacctgcagaaacaaaactatatgacctttcagacagaaaattcaaaattgccattttgaggaaactcaaagaaattcaagatagcacagagaagacattcagaactctatcagataaacttaacaaagaggaaactcaaagaaattcaagacaacacagaaaaagtttagaattctatcagataaatgtaacagagattgaaataattaaaaagagtcaagctgaaattccggagttgaaaaatgcaaccgacatactgaagaatgcatcagagacttttaataccaggattgaataagtggaacaaagaattagtgagctggaaggtaagctattggaaaatatggtcagaggagacagaagaaaaaagaataaaaaagaaagaagtacacctacaagatctagaaaatagacttaaaaaagcaaatctaagagttattggcattaaagtggaggtagagaaagagacaggggtagaaagtttattcaaaggataataacagagaacttcccaaacctagaggaagatatcaatatccaagaacaagaaggttgtagaacaccaagcagattaacccaaagaagactacctcaggcatttagtaatcaaattcctaaaagtcaaggataaaaggaaggatcctaaaagcagcaaaagaaaagaaacaaataaaatacaatggcactccaatacgtctggcagcagacttttcagtggaaaccttataggccaggagagagtggcatgacatatttaaagtgctgaaggaaaatatattcaagcataaaggagaaatgaagaccttcccagacaaacaaaagctgagggatttcatcaacactagacctgtcctacaggaaatgctaaacagagtacattaatcagaaagtaaacgatgttagtgagcaataagaaatcacctgaaggcacaaaactcactggtaacagttaagtatacagaaaaacccagaatagtataacactgtgactgtgacatgtaaactactcttcagtaaaatgactaaaagattaactgataaaaaatagtgactagaacaacttttcaagacatagtacaataagatataaatagaaacaataaaaagttaaaaagcagagggaggaagttaaagtgtagagtttattagttttcttttagcttaaaataatgagttattagacagtacttacaagcctcatggtaacctcaaatcaaaaaacatacaatggatatatacaaaataaaaagcaggaaattaaagcacaccacaagagaaaaccaccttcactaaaaggcagaagggaagggaggaaagaaggaagagaagaccacaaagccaccggaaaacataacaaaatggcaagagtaagtccttacttatcaatataacatcgaatgtaaatgggctaaactgtcaatcaaaagatatagagtggctgaatagatttaaaaaaaaaaaagacccagtgatctgttgcctacaacagacactccacctggactgaaaatgaagggattgaagaagatattccatgccaatggaaagcaaaaaagaacaggatacctatatttatatcagacaaaatagatttcaagacaaaactataagaagagacaaagtcactatataatgataaagaggtcagttcagcaagaggatataatagttttaaatatttatccaccttacactggagcacccagatatataaagcaaatattactagagctaaagagagtgatagaccccagtaaaataatagctggagacatcaacactacactttcagcactggacagatcttccagacagaaaatcaacaaagaaacatgggacttaatctgcactatagaccaaatagatatttataaaatatttcatacaacagctgtagaatacacattcttttcctcagcacgtggatcattctcaaagacagaacgtatattaagtcacagaacgagtcttaaaacattcaaataaattgaaataatatcaaacatctgactgaccacaatgagtaaaactagaaatcaataataagaggaattttggaaactatacaaaaacatggaaattaaacaatatgttcctaaatgaccagtgggtcaatgaagaaattaaacaggaaactgaaaaatttcttcaaacaaatgataatggaaacatgataaaccaaaacctgtgggacacagtgaaagcagtactaggagggaagtttatagctatacgtgcctacatcaaaaaataagaaaaacttcaaacaacctgatgatgcatctaaaagaactagagccaggtgcagtggctcacgcctgtaatcccaacactttgggaggccgaggtgggcagatcatgaggtcaggagatcgagaccatcctggctaacacactgaaaccccattgctactaaaaaaatacaaaaaacttaggtgggcacagtggcgggcacctgtagtcccagctgctggggaggctgaggcaggagaatggcatgaacccgggaggcggagcttgcagtaagccgagatcacaccactgcactccaacctgggtaacagagcaagactctgtctcaaaaaaaaaaaaaaaaaaaaaaaaaaaaaaaaaaaaaaaaagaactagaaaagcaagagcaaaccaaacccaaagttactagaagaaaagaaataataaagatcaaagcagagataaatgacattgaaacaaagaaaacaatacaaaagatcaatgaaacaaaaacggttttttgttttggtttggtttggtttggtttttttttggagacagagtctcactctgttgcccaggctggagtgcagtggtgcgatcttggctcactgcaacctccgcctcccaggttcaagcaattcttgtgcctcagtctcctgagtagctaggagtagccaggactataggcatgtgccaccacacctggctaatttttgtagttttagtagagacagggttccactgtgttggccaggctggtctcaaactcctgccctcaagtgatccacctacctcagcctcccaaagtgctgggattacaggtgtgagccactgtgcctggccaagaagttagtttcttgaaaagataaacaaaattgacaaacctttagctggactaactaaaaaaaaaaaaaaaaaaaaaaagcaaaaaaagagagacccaaataaataaaatcagagctgaaaaagaagacattacaactgttaccacagaaattcaaagatcattagtggctactatgagcaactatttgccaataaattggaaaatgtagaaaaaaatggataaattcctagatacataaaacctaccaagattgaatcataaagaaatccaaaacccaaacagatgaataacaagtaatgagatcaaagccataataaaaagtctctcagcaaagaaaatcccaggacccaatggcttcactactgaatactaccaagcatttaaagaagaactaataccaatcctactcaatctattctaaaataaacaggaggaaatacttccaaactcattctacaaggccagtattaccctgatgccaaaaccagacaaagacacatcaaaaaacaaaaacaaaaacaaaaagacctataggccaatatcattgatgaatgttgatgcaaaaatcctcaacaaaatactagaaaattgaattcaacaacacattaaaaagatcattcatcatgatcaagtgggatttatcccagaaatgcaaagattgttcaacatacacaaatcaattaatgtgatatgtcatgtcaacagaatgaagggcaaaaaccatatgatcatttcaattgatgctgaaaaagaatttgatacaattcaacatcacttcatgataaaaaaaatcctcaaaaaactgggtacagaacaacatacctcagtataataaaagccatatatgacagacccatagctagtatcaaactgaatggggaaaaactaaaagcctttcctcttagatctggaacatgtcaaggatgcctactttcaccagaagtcctagctagagcaatcggacaagagaaagaaataaacggcatccaaattggaaaggaataagtcaaattatccttgtttgcggatgatatgatctcatatttggaaaaacctaaagactccaccaaaaaactatcagaactggtaaacaaattctgtaaggttgcaagatacaaaatcaacatacagaaatcagtagcctttctgtatgccaacagcaaacaatctgaaaaagaaatcaagaaaataatcccattgggaggagccaagatggccgaataggaacagctccggtctacagctcccagcgtgagagacacagaagaccggtgatttctccatttccatctgaggtaccgggttcatctcactagggagtgccagacagtgggcgcaggccagtgggtgcgcgcactgtgcgcgagccgaagcaaggcgaggcattgcctcacctgggaagcgcaaggggtcagggagttccctttccgagtcaaagaaaggggtgacggacgcacctggaaaatcgggtcactcccacccgaatattgcgcttttcagaccggcttgaaaaacggcgcacctagagactatatcccacacctggctcggagggtcctacgcccacggaatctcactgattgctagcacagcagtctgagatcaaactgcaaggcggcagcgaggctgggggagaggtgcccgccattgcccaggcttgcttaggtaaacaaagcagccgggaagctcgaactgggtggagcccaccacagctcagaggcctgcctgccactgtaggctccacctctgggggcagggtacagacagcagtaacctctgcagacttaaatgtccctgtctgacagctttgaagagagcagtggttctcccagcacgcagctggagatctgagaaccaacagactgcctcttcaagtgggtccctgacccctgacccccgagcagcctaactgggaggcaccccccagcaggggcacactgacacctcacacggcagggtattccaacagacctgcagctgagggtcctgtctgttagaaggaaaactaacaaacagaaaggacatccacacagaaaacccatctgtacatcaccatcatcaaagaccaaaagtagataaaaccacaaagatggggaaaaaacagaacagaaaaactggaaactctaaaacgcagagcgtctctcctcctccaaaggaacgcagttcctcaccagcaacagaacaaagctggatggagaatgactttgacgagctgagagaagaaggcttcagacgatcaaattactctgagctacgggaggacattcaaaccaaaggcaaagaagttgaaaactttgaaaaaaatttagaagaatgtataactagaataaccaatacagagaagtgcttaaaggagctgatggagctgaaaaccaaggctcgagaactacgtgaagaatgcagaagcctcaggagccgatgcgatcaactggaagaaagggtatcagcaatggaagatgaaatgaatgaaatgaagcgagaagggaactttagagaaaaaagaataaaaagaaatgagcaaagcctccaagaaatatgggactatgtgaaaagaccaaatctacgtctgattggtgtacctgaaagtgatggggagaatggaaccaagttggaaaacactctgcaggatattatccaggagaacttccccaatctagcaaggcaggccaacgttcagattcaggaaatacagagaacgccacaaagatactcctcgagaagagcaactccaagacacataattgtcagattcaccaaagttgaaatgaaagaaaaaatgttaagggcacccagagagaaaggttgggttaccctcaaagggaagcccatcagactaacagcggatctctcggcagaaaccctacaagccagaagagagtgggggccagtattcaacattcttaaagaaaagaattttcaacccagaatttcatatccagccaaactaagcttcataagtgaaggagaaatcaaatactttacagacaagcaaatgctgagagattttgtcaccaccaggcctgccctaaaagagctcctgaaggaagcactaaacatggaaaggaacaaccggtaccagccgctgcaaaatcatgccaaaatgtaaagaccattgagactaggaagaaactgcatcaactaacgagcaaaatcaccagctaacatcataatgacaggatcaaattcacacataacaatattcactttaaatgtaaatggactaaattctccaattaaaagacacagactggcaaattggataaagagtcaagacccatcagtgtgctgtattcaggaaacccatctcacgtgcagagacacacacaggctcaaaataaaaggatggaggaagatctaccaagcaaatggaaaacaaaaaaaggcaggggttgcaatcctagtctctgataaaacagactttaaaccaacaaagatcaaaagagacaaagaaggccattacataatggtaaagggatcaattcgacaagaagagctaactctcctaaatatatatgcacccaatacaggagcacccagattcataaagcaaatcctgagtgacctacaaagagacttagactcccacacattaataatgggagactttaacaccccactgtcaacattagacagatcaacgagacagaaagtcaacaaggatacccaggaattgaactcagctctgcaccaagcggacctaatagacatctacagaactctccaccccaaatcaacagaatatacatttttttcagcaccacaccacacctattccaaaattgaccacatagttggaagtaaagctctcctcagcaaatgtaaaagaacagaaattataacaaactatctctcagaccacagtgcaatcaaactagaactcaggattaagaatctcactcaaagccgctcaactacgtggaaactgaacaacctgctcctgaatgactactgggtacataacgaaatgaaggcagaaataaagatgttctttgaaaccaacgagaacaaagacacaacataccagaatctctgggacgcattcaaagcagtgtgtagagggaaatttatagcactaaatgcccacaagagaaagcaggaaagatccaaaattgacaccctaacatcacaattaaaagaagtagaaaagcaagagcaaacacattcaaaagttagcagaaggcaagaaataactaaaatcagagcagaactgaaggaaatagagacacaaaaaacccttcaaaaaatcagtgaatccaggagctggttttttgaaaggatcaacaaaattgatagaccgctagcaagattaataaagaaaaaaagagagaagaatcaaatagacacaataaaaaatgataaaggggatatcaccaccgatcccacagaaatacaaactaccatcagagaatactacaaacacctctacgcaaataaactagaaaatctagaagaaatggataaattcctggacacatacactctcccaagactaaaccaggaagaagttgaatctctgaatagaccaataacaggatctgaaattgtggcaataatcaatagtttaccaaccaaaaagagtccaggaccagatggattcacagccgaattctaccagaggtacaaggaggaactggtaccattccttctgaaactattccaatcaatagaaaaagagggaatcctccctaactcattttatgaggccagcatcattctgataccaaagccgggcagagacacaaccaaaaaagagaattttagaccaatatccttgatgaacattgatgcaaaaatcctcaataaaatactggcaaaccgaatccagcaacacatcaaaaagcttatccaccatgatcaagtgggcttcatccctgggatgcaaggctggttcaatatacgcaaatcgataaatgtaatccagcatataaacagagccaaagacaaaaaccacatgattatctcaatagatgcagaaaaagcctttgacaaaattcaacaacccttcatgctaaaaactctcagtaaattaggtattgatgggacgtatttcaaaataataagagctatctatgacaaacccacagccaatatcatactgaatggggaaaaactggaagcattccctttgaaaactggcacaagtcagggatgccctctctcaccactcctattcaacatagtgttggaagttctggcccgggcaattaggcaggagaaggaaataaagggtattcagttaggaaaagaggaagtcaaattgtctctgtttgcagatgacatgattgtatatctagaaaaccccattgtctcagcccaaaatctccttaagctgataagcaacttcagcaaagtctcaggatacaaaatcaatgtacaaaaatcacaagcattcttatacaccaacaacagacaaacagagagccaaatcatgagtgaactcccattcacaattgcttcaaagagaataaaatacctaggaatccaacttacaagggatgtgaaggacctcttcaaggagaactacaaaccactgctcaaggaaataaaagaggatacaaacaaatggaagaacattccatgctcatgggtaggaagaatcaatatcgtgaaaatggccatactgcccaaggtaatttacagattcaatgccatccccatcaagctaccaatgactttcttcacagaattggaaaaaactactttaaagttcatatggaaccaaaaaagagcccggattgccaagtcaatcctaagccaaaagaacaaagctggaggcatcacactacctgacttcaaactatactacaaggctacagtaaccaaaacagcatggtactggtaccaaaacagaaatatagatcaatggaacagaacagagccctcagaaataatgccgcatacctagaactatctgacctttgacaaacctgagaaaaacaagcaatggggaaaggattccctatttaataaatggtgctgggaaaactggctagccatatgtaggaaactgaaactggatcccttccctacaccttatacaaaaatcaattcaagatggattaaagatttaaacgttagacctaaaaccataaaaaccctagaagaaaacctaggcattaccattcaggacataggcatgggcaaggacttcatgtccaaaacaccaaaagcaatggcaacaaaagacaaaattgacaaatgggatctaattaaactaaagagcttctgcacagcaaaagaaactaccatcagagtgaacaggcaacctacaaaatgggagaaaattttcgcaacctactcatctgacaaagggctaatatccagaatctacaatgaactcaaacaaatttacaagaaaaaaacaaacaaccccatcaaaaagtgggcgaaggacatgaacagacactaatcaaaagaagacatttatgcagccaaaaaacacatgaaaaaatgctcatcatcactggccatcagagaaatgcaaatcaaaaccactgtgagataccatctcacaccagttagaatggcaatcattaaaaagccaggaaacaacaggtgctggagaggatgtggagaaataggaacacttttacactgttggtgggactgtaaactagttcaaccattgtggaagtcagtgtggcgattcctcagggatctagaactagaaataccatttgacccagccatcccattactgggtatacacccaaatgactataaatcatgctgctataaagacacatgcacacgtatgtttattgcggcattattcacaatagcaaagacttggaaccaacccaaatgtccaacaatgatagactggattaagaaaatgtggcacatatacaccatggaatactatgcagccataaaaaaggatgagttcatgtcctttgtagggacatggatgaaattggaaatcatcattctcagtaaactatcgcaagaacaaaaaaccaaacaccgcatattctcactcataggtgggaattgaacaatgagatcacatggacacaggaaggggaatatcacactctggggactgtggtggggtggggggaggggggagggatagcattgggagatatacctaatgctagatgatgagttagtgggtgcagcgcaccagcatggcacatgtatacatatgtaactaacctgcacaatgtgcacatgtaccctaaaacttaaagtataataaaaaaaaaagaaaaaaaataatcccatttataatagctatgaataaaatagctaagaattaagtttaccaaagaagtaaaagatctctgcaatcaaaactataaattgattgcaatgatgcaagaaactaaagaggacaccagaaaaatggaatgatattccatgctcatggattggaatattgttaaaatgtccacactgcccaaagcaatctacagattcaatgcaatctctatgaaaataccaatgactgtcttcacagaaatagaaaaaaaatcctaaaatttgtatgggaaccacagaagacccagaaaagccacagctaatctaagccaaaagaacagaactgtaggaatcacactacctgacttcaaattatatgacagagctataataaccaaaacaacgtggtattggcataaaaacagacacacagatcaatggaacagaaaagagaactcagagataaattcatacatccttagtaaacttgttttcaacaaaggtgccaagaacatacattggggaaaggcagtctcttcaataaatgatgcaaggaaaaactgcatatttatatgtagatgaatgaaagtagaccccatctcttgtcatatgcaaaaattgaatcaaaatggattacagacttaaatctaagacctcaaactatgaaactactccaagaaaaccctggggaagtctgagcatggtggctcacgcctgtaattccagcactttgggaagccaaggtgggtggatcacaaggtcaagagatggagaccatcctggccaacatggtgaaaccctgtctctactaaaatacaaaaagttagccgagcatggtggtacatacctgtagtcccagctactcgggaggctgaggcaagggaattgcttgaactcaagaagttgaggttgcagtgagccaagattgtgccactgcacttcagcctggtgacagagcaagactctgcctcaaacaaaaacaaacaacaacaacaaaaaaaccacttgggaaactctccaggacactaaactgggcaaagatttcttgagtaatacttcacaagcacaggcaaccaaagcaaaaacggacaaatgagatcacaagttaaaaagcttctgtaaagcaaaggaaacaatcaacaaagtaaagagacaacagaatgggagaaaatattcaggccactgaattcattttaaatgatagattcttccccttgcctcatcccagaaccactctgtatcttcaggggctgggtccaggcacctagagagtttgtaaaaattccacaagaggttctgatgtacaggcaggactgagaacccccagttagtgcaaaggagagtgtcttcctatggtgacttctatcattaaaaatctacttctgaacttgggctgcaaagtagcaggaagaaaaccaccagctgagttaggtttccatgagcaagagattcttacccaaggttcaatcataaattacatgacttgaaagcaaattctctaaaatgagcatgttgcccaagatcttaaaaataaatagaataggccgggcacagtggttcatgcctgtaatcccagcactttgggaggccagggtgggcgaatcaccttaggtcaggagttcaagacaagcctggccaacatggcaaaattccgtccttactaaaaatacaaaaattagctgggcgtgatggcgggcgccggtaatcccagctactcgggaggctgaggcaggagaatcacttgaacccgggaggcggaggttgcagtgagctgagatcacgccacttcactccagcctgggcaacaagagcgagattctgtcaaataaataaataaacaaataaataaaaagaataaaataaaatgagatggcacagtatcaccacccttccccatcagtaatcactcagtgcaggaatacccctcaccctgcggctttacaagcatcaattactctggtgtttttaggctgtggaggtggatggtaatttacaaccgatcagagaaagaaagaaaataagtagccagagtagactcccatatgtggtatgtgccgaaaatggaaaattcatcttattaagtggaacagctccctcagcacttttcacagattccctaggatatcctacgattgatacgtttcaatgagccatctttatctgtgttttggttccaactaaatattaattcatagatgcgctaaagaccccacattcttaattccagattattttatgaagatatcactttaaggccgggtgtggtagctcacgcctataatcccagcactttgggaggctgaggctggtggatcacaagttcaggagatcgagaccatcctggccaacatggtgaaactctgtctctactaaaaatacaaaaattagccaggcgtggtagcatacgcctgtaatcccagctacttgggaggctgaggcaggagaatcgcttgaacccaggagcggggttgcagtgagccgatatcgcgcctctgctctccagtctgggcgacagagagagactccatctcaaaacaaaaacaaacaaacaaacaacaagaaaactccaaaaatacaaaaactagtgtttcccagaacacatgctgagaagtgtgttcatcaggaaacgacagagctcatcccatagcactgaaaacattcccgctcatttctgagaatctttgctgaatctttacacaaagggtaaagttactccactcgaacctgtgggcttatctttctccatggcacattctaacagcatgtttgtgcctgtccttccttctcacaaaacacaataaaggtccttctagtgaaaagtactctgaatgggtctctcaaagcacttgtttaacaggaaagcttagttgggctagaggatttcctttctttaaaaaaaaaagaaagcaactttctgtgctacaaccctcattaaagaaactagcgcagttcaggctgcttaggcagtgttttgctagaatgggtgctggtccctggtgttagtctggtggtacctcgcagggtgactcatgttctgatgtcttaaagaactgattctctgaaggaaattattcaggatgtgaaatgtcaagaaagacagatgatgattaaaaaaagaaagagaagtcagggtgacactgaccttaactgggaaattgcacaaatgagaatatagtgggaaaggaaagagggatgaagagggcaaagagaggaagggaggaaagaaggagagcagactggctgtgagggaggcagggcacatgggaaatgggaggaaagaggtctggcatttactgaacatcatctgtgtgcttgggaagggcgcagagaggtattagaataagaatttttgtaaaaagtcacaggcaaagtcatttgatatgggttttgagaagcgagaaccacccaaatcccctaggaatataaatcacccttggaaaacatgactaagattcaagactgagcattttttttttttttttgagatggagtctcactttgtcacccaggatggcgtgtagtggtgggatcttggttcactgcaacctccatttcccaggttcaagcgattctcctgcctcagcctcccgagtagctgggattataggtgtgcaccaccatgccgggctaatttttgtatttttaatagagatggggtttcactatgttggccaggctggtctcgaactcctgacctcaggtgattcaacttccttggcctcccaaagtgctgggattacaggcatgagtcaccacacccggccaagactgagctcttttaatgcccatataccgagggtagaaatctacaaaacgtatgacctgcaaactgaatgatcaggaaaggatcctaaccaccagaatgggcaggcagagttgtaaaaaaacaggggatgagagtttccacccactacatgcgtctctgacatttctgcaggcacccaatcccggtccctttgctgtgtctcggactacacatctgatggcgtgccaccaagcaccaagagcaaagttgaccctggaccccatggagccaattctcctgccaccccatcagatatctacatttggtagagattccaaaattgtgataggagactaagcagtgcaattagcggggaaaggaatgaggaagaagcatgttttattcactgtttgggcaatcaactagaacttccttgtaacttgtctggctgcttcagctttagctagttcaccaatatccagtctggacctgttatgacagaggccaccttcctgttcagattggtgggaattccattttctttctttctttttttttttttttttttttttttgagttggagtttcactcttgttgcccaggctggagtgcaatggcaccatctcagctcactgccacctctgcctgccgggttctagtgattctcctgcctcagcctcccaagtagctgggactacaggcacttgccaccacgcctggctaatttttgtatttttagtagagagggggtttcaccatgttggtctggctggtctcgaactcctgacctcaggtgatccacccacctcagtctcccaaagtgctgggattgcaggcatgagccactgtgcccggcaggaatttcactttaattttggtcaagtatcatgagtttagtaccttctgattcaaggcagaaggcacttaagctcaatcctcaacagcttgaaatcaaaaccagaaacccactctaagaggtaatccatctaaatgtttgctatggaaaggtagcggacacacaacatacaggagtcaatggcctccccacatttgggtgagatggggctcccggggtgcatgcactccccacactgagaatctccccacaggcagattctgtgaccagaacaggaagaatcattgcagaaacgggatttcatgcatatcacatcttctacaggttaaaattattagaaaaaaatagctcatccagatagcagaacccaagaaagagaaactagagggggggtttggcatgggggaaaaagaggcttctagaaagcctgcaagggcagaatggcagtaacagagacctcgggaaaaccagctaaaatccgaggcttctctgactaaggctgcagggaggcgtgtctggagcgctgaaaccagaacactatgatgatttctgtgaatgtgatgctaaggttgttcggctagaattttacggaacaccatggaggaaatattttcagcctgatatcaaatctggggtccagagagaaaagtctcagcttgctcatggagaagagctacaagagaagcccacatctgtttgccagggtgggagaaccagcaggagatgaaatagaaaagccacaaaagaaaaggcatcatggtaaaagcaagccatgttctactgccctcagtgatgtactgtctgcggtcacttacactcaacattggcagagaccacgtggtccacaaagcctaaaatgtttacttgctggccctttacagaaaaagtttgctggccttggtctagaccctgcctctgatgctggcctgaccctgggcagaccatatacatatatatatatacacacacacacacatacacaaggatggttatttatataactcataccgccaatttaacaatactaatagttaacatctaagactgattgatatgtatcctttaaaaatttctgggtgcagtaacatgcagattcttgcccgcataactccattttaagaatatatacactggctacgcatcgtagctcatgcctgtaattccaggagtttgagaggttgaggtgggcagatcccttgagctcaggagtttgagaccagcctgggcaacatagtgaaataccatctacacacacaaacacacacacaaatacaaaaattagttggacatactggtgcatgcctgtagtccagctactcaggaggctgaggtaggaggatcacttgagtccaggaggtcaaggctgcagtgagccgagttcacaccactggactccagctggggagacacagtgagaccctgcctcaaaatatatatatatatatatatatacacacacacactaacaaagaccttaatgtattttctctgcagaacttgtcagatatgctctcccagcccttcttactaaggacaatgggtacttgtccaagcccatccaccattctgtcagtcgcatcctaagaagagatcagagaagattccctcctagaccacgcaaaatagaccgatcatctttggcacgtgtggccatgacccacatgaggatttataagcgacctagtcaccgggacttcatgtggttaccttttctgaatggctcccggttctcctctgcttccctgttgactcggttttgttctggttcaacagcagacccctggtcatcaagttcatcttctgtttcatcatcactgtagggaaccacttcgtcattaggctgagaatcctcgtcaaatgtcgtttctgagtctctttctgtactcattctgctggcaaattggaactacctgcttaaaaggaaagagaaaccagagtgaattatgactcttgcccagtttttggttgaatactgcctgcatgctgctacaatgccccttttacagaacattgtctaacatgtaaatattctggaatagtacccccaaattcaacttgacatgaaaacaagaacaaaaccattcagtactgattaaatgcttgggtaagatttttttaaaaaatatggagctgcaaaccttttatttttaaacaagggtatatatatatatgtatgtgtgtatatatatgtatatatgtatatatatgtgtatatatatgtatatatgtgtatatatgtgtatatatgtatatatatgtatatatgtatatatgtgtatatatgtatatatgtgtatatatgtatatatgtgtatatatgtatatatatgtgtatatatgtatatatgtgtatatatgtatatatgtgtatatatgtgtatatatgtatatatatgtgtatatatatgtatatatatattcaaggcaatatttcaaattagggggtctcaatgaaataaatttagtgggtaacaatcaacattaaaataaaatgaaacaggctataaaatatcagattacagcacatataataagtactgcttgataaaatagttgtatacattcacacgtttatttgcattgtgggtgttagtggagttgaatttcttttttttctttttttgagaatagagtctccctctgtcacccaggctggagtgcaatggcatgatctcggctcactgtcacctccgcctcctgtgttcaagtgattctcctgcctcaacctcccaagtagctgggattacaggcacacaccaccacgcccggctaatttttgtatttttagtagagacggggtttcactgtgttagccaggatggtctcgaactcctgacctcaagtcatccacccgcctcggcttcccaaagtgctgggattacaggcgtgagccaccgcgcccggccggagttgaatttcttactgtggattgctggcaaagttgacaaaccactgctctaagatatctggtttctgctaacactaacgtcctgagcctttgttctgatacaacatttttaatataaccttagatcttccaagtttactgacttcccaggaacactccctagcctttctatcttcctaactaccactgcccactctgtatctggaatttgtgtttgagcatctaccgcataagatgaccccatacaagtgagaagaacaaccttagttagatttattttaggaaaatatttacacaaatacctcaggttacagacacacagcctggcatttacataagcatcacagtgccgtgtagtcagtattgttaatgacagcagctcgcatttattttgtgttaactgcatgccaagccttgcactaagcactttatagacatgtgctctttgaaacttcccacaccaccatggtgaataacagtattattgttattcctacccagcagaggagaaaaatcaaaacactggagtgctaaataatttgcacaatgattattaaaaatttaaggcagccacgcacggtggttcacacctgtaatcccagcactttgggaggccgaggtgggcggatcacgaggtcaggagatcgagaccatcctggctaacacagtgaaaccccgtttctactaaaaatataaaaaattagccagacgtggtagcgggcacctgtagtcccagctgctcgggaggctgaggcaggagaatggcgtgaacccaggaggcggagcttgcagtgagccgagattgcgccactgcactccagcctgggcgacagagcgagactccatctcaaaaaaaaaaaaaaaaaaaaatgtaaggcaaaaacaactgcttcacaaggagaggtctatgctctatttttgtactatggtttatgatatattttgagtgaaaattgcctcaagtagaactatgtagctgattgcaagttttgcaccaaatcttagatctctaaaataatttttacattcacaaatggagaaattttcaaatatttatatgaggatttttaccaagtattatgtaaaacagtaaaagccaaaagcaagctgggttacaattgtcgactgtgtaaataaattgtggcatctcatattataggataatgtgcaacaatctaggtgatccgaagagtatttgatgacattgcattaatgaccttaagttaataggtaagttataaagccatatgtatagaatacacccagttattcacacacacacttgttcattttccaaaatttcaacaattgacatacattattttattattattatcttttgagacagagtatcgctctgtcacccaggctagagtgcagtggtgcaatctcggctcactgcaacctctgcctcccaggttcaagcaattctcctgcctcagcctcctgagtagctgggattacaggcatgtaccaccatgtctggctaatttttgtatttttagtagagatggggtttcaccatgttggccaggctgggacatacattattttaagtgagatgatgcatgcaaaatgctcaactcagtacctagcctgcaataagtattcaatgaacattaactgttaatttttcatatacttcttggcgatttgtatgtttccttttgaaaaatgtctattcatgtcctttgcccactttttaatggtattattattattttaaaatattgctggcattcattattacaaagaacaacttagattctactgcatgatgctgtactgtggcacagttctaaagagccctatagtcatggatgcaaagttcctagcactactggtcctcagcacctcaggccattatcttatggcttcacagaatattcattccccaaatccatagtctttacctctggccttagcttttcagtagcaagcacaagcattcctggtgagagacagggctagctggatttcctaggccgactatgaatccctaagtctagctgggaaggtgactgcatccacctttaaacaggaggcttgcaactgagctcacacctgaccaatcagagagctcactaaatgctaattaggcaaaaacaggaggtaaagaaatagccaatcatctattgcctgatgaactcatctattgcctgatgagggacaaggatcgggatataaacccaggcattggagccagcaagggcaaccccctttgggtcccctccttgtatgggagctctgttttcactctatttcactctattaaatcttgcagctgcacccttctggttaccgctagaactgagctttcgctcgccgtccaccactgctgttttgctgccgtcgcagacccgccgctgacttccatccctccaatccagcagggcgcccgctgtgctcctgatccagggaagcacccgttgccactcctgatcgcgctaaaggcttgccattgttcctgcatggctaagtgcctggtttcgtcctaatcaagctgaacactagtcactgggttccacggttctcttccgtgacccacgacttctaatagagctataacactcaccgcacggcccaagattccattccttcgaatccgtgaggccaagaaccccaggtcagagaacacgaggcttgccaccatcttggaagtggcctgccgccattttggaagtggcccaccaccatcttgggagctctcggagcaaggacccctggtaacactggcagtacttatactttcattggttatacttatacttccccggttatatttatactttcctggcagtacgtatactttcatggtttatactattttaaaattattttttattaaatggagccaaattttttaaaagtcatcttttccactaaattgacatcaccatgttaaatctaaatttccctactaagtctttattttattttactttaagttctaggatacatgtgcagaacatgcaggtttgttacataggtatacatgtgccatggtggtttgctgcacccatcaacccgtcatctaggttttaagccctgcatgcattaggtatttgtcctaatactctcccattccttgccccccccacccccacccccaacaggccccagtgtgtgatgttcccctccctgtgttcatgtgttctcattgttcagctcctgtttatgagtgagaacatgtggtgtttagttttctgttcctgtgttagtttgctgagaaagatggcttccagcttcatccatgtccatggaaagaccacgatctcattcttttttatggctgcagggattatttgtttttgagttgtttgagttccttgtatatttctggatactagtccttagttagatgaatggtttgcaaatattttctcctattcagcaggaaacactgttgattgcttcccttgctgagtagaagctttttagtttaatatagtcctatttgtctatttttgttgttgttgttgcctgtgcttttgaggtcttagccataaaatctttgcctagaccaatgtcctaaaacattttccctatgttttcttctagtataaagttttattagttttttttttttttttttttttgagaggagggtttcactctgtcactcaggctagggtgtagtaggacgatcatagctcattgcagcattgaactcttgggctcaaggaatcttcctacctcagcatcccaagtaactgggactaccagtgcatgccaccatgcctattttttttttttttttgtagcgatgggatctcactgcattgtccagactggtcttgaattcctgggtcaagtgatcctccaggcttgggctcccaaagtgctaggattataggtgtggtcccatttaagtctttaatccatcttgagttgacttttgtgtatggtgagagacaggggcccagtttcattctttagcatgtggggatttatttctgggttccctattctgttccattggtttatgtgtctgtttttagcccatattatgttttggttactacagccttgttatatatatatgtatcaaggtgactgtgaaggtactatatggaaacattttttattgttgtaaaatatatgtacataaaatttaccattttagccattttgttttgtttttctcattgcagcctcctgggctcaagcaattctcccacctcagcctcctgagtagttgagactataggtataagccactacatccgactaatttttgtgtttttagaagagacagggttttgccatattgcctaggctggtctcaaacttctgggctcaagtaatctacctgcctcagcctcccaaagtgctgggattacaagcatgagccaccacgccaggctttgtttctccctacttttatttttttttaatttcttaaagctgtaccattggagaattttaactttttgtttgttggttggttttctttctcttattattgttattatttttttgcatctcagatgacacaaaccattgtttgtttcctgagacatggtttcactctgccaccgaggctgcagtgcagtggcatgatcctagctcactacactctcaaatctgagggctccagcaatcctcctaccctgctccccagcctccctagtaactaggactagaagcacaagccaccatgcctggctttttttttctttcttttctttcttttttttttaaaagagataggctctccctatgttcctcaggctggtctcaaactccgggccccaagcaatcctcccacctcagcttccttttagcccttttcaagtgtagggttctgtggcattaagtgcatttatacaaacattttgtaagttatccttttcatcattgcttccaaactgccaggcatctggatattaagactgtctccagccctttgaggttgagagaggaagcaagcacggaggaatggatttgacaacccacatgtccgtgactcaaagcaagcaaggccttgcacaaccaactcgccacccacacaatctgcacagtctcagtgagaaagcaggagcagggagctctccgctgagagtgaagaaatgtcctcaactcaacttctctgcagtgtgcatgtgtgtgaaacgcagacacacacgggaggaatttggctctgtcattttagtgtaccaaagaaaaaaaaacagggagaaatcacttgtttgaagccctaaatgacataaggaagattttcccagatctaaataatgatccctaaggtcaggtgctgtgtatggtatggatttggaaacttcataatgtctctgaccaccactccaggacactgcagacaggtgtgcatttactcagcatccagtaaacacctgcaaggtgcagagtactacactaggcacagggaacagagctactgactgactgccagagtttcgaagaatacagataagtcaactattaaagctaggaaacagaccggatgcggtggctcacgcctgtaatcccagcactttggaagaccgaggcgggtggatcaactgaggtcaagagttcaagaccagcctgccaacatggtgaaactccgtccctattaataatacaaaaaaattagctgggcatggtggcacatgcctgtaatcccagctattcgggaggctgaggcaggagaattgcttgaacccaggaggctgcagtgagctgagatcgcgccattgcactccagcctgggcaacaagagcgaaactctgcctccaataaataaataaataaaataaaataaaataaagccataaaacagtaaagccagtcgtttttgcctcaaatactcctccaattcatcacctcctctctatctccatggccaccatcatctctccctggaaatgctgcgagatccctctaactagactttccacaattaacttccacatgaccaccaaaggcatgccattctcctgcttacacccttcctgggtgttatggattgaattatggcccccgaagtcatatgttgaagccataacacccctcaatgtgactacatggagagaggtcctttaaggaggtagttaaggttaaataaggtcatcagatggggccctaatccaataggacttgtgtattttatttttattattttttagactcagtttcgctctgttgcccaggctagagtgcagtggcatgatctcagctcactgcaacctccacctccctggttcaagcgattctcctgcctcagcctctcaagtagctgggattacaggtgcccgccatgacactcagctaatttttttgtattttcagtagagacagggtttctccttgttggtcaggctggtctcgaacttctgacctcaggtgatccgctcaccttggcctcccaaagtgctaggattacaggcatgagccaccatgcctggccaatttcttattcgttaggtctcaacttcagtgtcctcttccactcatggtattgagcaggattctgccctcctcttcctgctaccactggcccccttgagcacctacatttctgtttccttcctaacacttatcatgatttgtaaacatgcatttgctttcatttatctgcctttcccaccagaccataaactctacaagaacagattggtctgtgaatactcagtgcctactacacagttgacactgaaagatctggggaaagagcaaatcaactttcaataaagtcttcaagggctcagagagttgtcttacaccaaagttctttaccacctttacacaggtcacacctaccacatggtaacagattcacaaagtcattggactagggatgaaagattgagggcaatgatgggagaaaacagcaacagttaaggtcagaagtcatacaagatgaaactttttaggagtctgagtcatttgaggccatccaaaaaccattgtccaagattttaccatgtacgcaaaaccaaaccagccctctagtagggtactgaagatatcaaaggtgaggaccaatctttcttgtccatcactagcacctaccagagtctggcatataggaggctcgtttgtttctgtacttaggaggcttatagtctagacaagaattggcaaattgcagcccatgggccaaattcggcccactacctatttttttagataaagttttattagaatgcacccttactcattactgacataccggctatggtagttttgttttttgttttgtttgtttgtttgttttgagatggagttttgctcttgttgcccagactggagttcaatggcgcgatctcagctcactgcaaccttcgtctcctgggttaaagcaattatcctgtctcagcctcctaagatgctgagattacaggtgtaagccaccacgcctggtccttcatcatttttttttaatggcttttaaagttcacaagaagaaagactatttccgaaatctgtttttcctcattttgtttattattattattaaagacaatgctgtaaaatatttaacatatcgtaatatataataagtatgaattatatttctatatgttctatgctatacgtgtttcttattatatgttccatactaaatataaattactactctaagatggcccccagtgatcccaccttttggtgttcacatctttaatttcctgtgagtgtggcatacacatgaggtggtttgcttcttttttcttcctttttttttttttttttggttgttgattcaagttcttgctctgtcacctaggctggagtacactggggtgatcaagctcactgcagcctcaatctcccaggctcaagtgatcctcctgcctcagcctcctaagtagctgagactaaaggtgtgcaccatcacacccagctaatttttttggtttttagtagagatgaggtcttgctagtttgctcaggatgctcttgaactcctgaggtcaagcaatcctccctccttggcctcacaaaatactgggattacaggcatgagctaccgtatccagccccttttccttctttcttcttcttcattttcttttttttaaaataagcctgagttcctgaaccttgctgctttattttttgagatggagtcttgctctgttgcccaggctggagtacagtggcgcgatcttggctcactgcaacctccacttccctggttcaagcaattctcctgcctcagcctcccaagtcacggggattacaggcgtgcaccaccatgccaggctaattttttgtatttttagtagagacagggtttcaccatgctggccaggctggtcttgaacttctgatcttgggatccacccaccttggcctccccaagtgctgggattacaggcatgagccactgtgcccagcttgaaccttgcttctaaccaatagaatatggcgcaggtaatgggatgtcacttccatgattaggttataaaaaaccatgacttcttgttgccagccaactctttccccttccttgctttggtgaagcagctgccctatggagaggctcacatggcaagatgtgaagttagcattgaccaacagccagcagggactggagccctcagtccaatagtccttaaggaatgcagtgaattttgcaatcactacatgaacttgaaagcagatccttcctcagtcctgccttcagatgagacatcagctgggctggcaccttaattgtagccttgtgagaaatcctaatacggagaacccagttaagctgtgctcagacacttgattcatggaaactgtgagataataaatgcgtgttggtttaagctgttaagttttggagtagcttgttacacagcaatcgacaaccaatacacataccattagtcacaagcagtaattctagggtcaggcactcaatgtagccactattatttccaagttattccaaagagcccccatctaaaaggtagcagaaatcttctctattttcctagttagtccagacacatgccacaccctgtttggagtctgcccagtattcttttatttacttatttgagacagagtctcactctgtcacccaggctggagtccagtggtgtgatctcagctcactgcaacctctgcctcccaggttcaaatgattctcctgcctcagcctttccagtagctgggactacaagtgcatgccaccacacctggctaatttttgtatttttagtagagacagggttttaccttgttggccaggctggtcttgaactcctaacctcaagtgatccacccacctcggcctcccaaagtgctgggattataggcatgagccaccacgcctggccaatgctcagtattcttgaaagtaaaatgacaaacttgatgacagttgtaattagataaagaatctcatgaagcaatagtaataaaatgtatctaagatctgcattaaatttaaactttatactgttatagaaacagcgtaattacagttcccagcaggaacaggattacattttttatttcctcccaaggcaggacctaaaaaatctagaagcctgggataaataacataaaactaaggtatcaacagtatcactgtggtggggacaattcagccaggatctttacatatgatagaaaaggcttctctgagtccacagcttcaccccctattcctcagaaaatccgccccagagccctttctcacaaaggaagattggctgcctgggtgtggtggctcacacctgtaatcccagcactttgggaagctgaggcaggaggatcatttgaggccaggagttcaagacgagtctgggcaatatggcaagaccccatctctacaaataataatttaaagaattagctgggcacctgtagtcccagctacttgggaggctgaggcagaaggatcgcttgagcccaggagctcaaggctacagtgagttaggatcttgccacttaacttcaggctaggtgacagagcaagaccccatctctataaaaaaaaaaaaaacaaaacagactggttcttgtttcattctgtacaacttcaatgcggtcattagaaaaggtacaggggaaatctcaaaaccttgacatttcagagatgagcagctttttcattcccctggctaaggttcaaaggatttcttagtccagcattgccatgggctcacagcatttcctagtaatattatatttcttcttatccataaaaggcagccccttccaggacaaaggatttttcatacagattgtctcatgcaattgtcatggaattatgctgaggcatgtcgccaggcaatgtcattaccttcttactaatgaaaaaactgaggtggtttcaaagcttgcccagggtgatttagctcctagctattcaggccctttccacacatatcccagctctgtgctctctgtggtacagtgaacgcatcgtagattcagattggaattcaagctctgcccaggaagcatcagagcctgctctccactcccaacatcacctacttccctcccttccccacacctactaacaacatcattagtcacaagaaaaccctaagcaaaggaagaatttgacaagcaaaaaatatcaaactttgaggtctacaggcagatctatcctacaccagtgaattctaaaatgtaaaatgcttcccaatgtatgccgctgaagagtgaagtgagagcaatcattatttcctagacggtttttgagctgggcaacctgggagtcacagaggtgagcaagaacttggggtgggtgggagagagatattaaggaactaaaaaaacctcagaggcaggaaaatgcaatggaaaggcccagcaccggcgcaggtgggagatctgggggaaagagcagagctggggaaaggtagttttggagtcacctccaaaagtaaggcagctcatgcagccttgagaaggctttattccagggagttagagggcccatggaaggtgtctgcaaaggaaagaaatctgatctgcacagcactcatctgacagggggaagggtgactgggaaggtgagagcctgggagggagactgttcaaaagtcaccctggaaacagcatctccttgtcacagtttcttcacctggaacaccaagtggttctaccttattacctccaccatcacactcagcaacaacactcagtgcatgaatctagccacagcaagaagaaatacaggcctgggccgaacgcggtggctcacacctgtaatcctaacattttgagaggccaaggtgggctgactgcctgaggtccggagtttgagaccagcctggccaagacagtgaaaccccatctctactaaaaatacaaaaattagccaggcatggtggtgtgtgcctgtagtcccagctacttgggaggctgaggcaggagaatcgcttgaacccgggaggtagaggttgcagtgagccaagatggcaccactccagcctgggtgacagagtgagactgtctcaaaaaaaaaaaaaaaaaagaaagaaatacaggcctgaactagggtggtggcagccagaaaaatgtgcttaaaatgaaggcagggtggggctgccattcttttgtctagaaaatgaaggaaaaaaaaagtaaataaaagactggggctggttcccataggataagaatgctgtcatttccccagatgtttattttggagactcggcctcaatccacaatgtacttttatagtaaataatgaaagttaccaggagaaaaccctggttatttttacgttcaagcgtcatccttagttgttagggacaatggcctcatttttaccccattactattgactctataattaggctttaaagttatattcatgtttaaataatacaaagtcataggagctttataattgacagctacctggaagcaaacccttcagggtaaaataagtctgtcaagctgaattaattttaatgttagaagagtcaccaagctattaatacaaagactgcactcccgaaagacatacaaaacatcatagctttctggaacaaaatataaactttgaaacttttgatctacagagagacaacttatattccccatccagactcactaggaatggcttatttgaatgaaaaggcagtagaagaggcagataagtaaatagaaataataaacacataaaatgatacaataaaagattactcttactagcaatcaaagaatgacaagttgatgaaaacatagacaccattttatgcctattcagttgacactattcaatgttttcaatgtcagcagtggagatgaatgaatcctcacccaccttgctgctggccttgaaattagtatatgtattactgatggccacgctttatgtacccaaaacactaaagatatatttgaagcaatcacctcatttacagagccttttccaacaggaatacttcaatgaaaggactcttactgaaacaaatttttttttttttgagacagtgtcttgctctgtcacccaggctgtagtgcagtggggagatctcggctcactgcaacctccgcctcccgggctcaagcaattctcctgcctcagcttcccaagtagctgggattataggcatgcaccaccatgctcgagtaatttttgtatttatagtaaagacagggtttcaccatgttggcaaggctggtcttgaactcctgacctcaggcgatctgcctgcctcagcctcccaaagtgctgggattacaagagtgagccactgcacctggccacaaaatttttgattggcgtcattagttataaaaagcaggaatggaaaccacatgagtgtccaacaagatctcatggttttacaattttttttttttttttctgacgcagggccttgcactgtcatccaggctggagttaagtggcatgatcatgactcactgcagcctcaacctcctgggcttcagtgatcctcccacctcagcctcccaagtagctgggaccacaggcaaatgacaccacaactggctaatattttgagaaaatttttgtaaagacgaggtttcactacattgcccaggctgatcccaaactcctggcctcaagcaatcctcccacctcaacctcccaaggtgttgggatgatatgcatgagccaccacgcctgacctaaacatttttatgttttagtatagctattaaaaataacagctatttttaataacactatcagatgaaacgtaggaaatgttttacagtattaaccgtgggggtgaggcagaaatcagaattgtgttctataactgcagctttgtaaataatatgattgtttttagaactaacatttgcactgaaagatacataattctctgtgtgtttttccttccaaaataatctgcaattaataatagctatccactccctatatccaaacactgctgagcaattgctcatatactgggtacatttcatgcaatttttacagcacacacaaaaggaagggcttatcctcattttgtgggcttgaagaggttaggtggcatacttctccagggtcacatattgaggtttcaaccaggtctgtttgtccccaaatctcttacgatttgtcctggtgctgttcaaagggggagaaaagttggatcaggccattaggattatgcccactgatgcttacttttttttttttttttttttttttgagacagagtctcactctgtctcccaggctggagtgcagtggtgtgatctctgctcactacaacctccgcctccctggttcaggcaattctctcctgcctcagcctcctgagtagctggaattacaggtctatgtcaccaagcccagctaatttttgtatttttagtagagacagggttttaccatattggccagcctggtctcaaactcctgacctcaagtgttgcacctgccttgacctcccaaagtgctaggattgtaggtgtgagccaccactgtgcccagccactgatactttcttaatatcattctgtctctttgcaaatgattacaaaaacaaaaatggtagcatggaagtgggttcatggaatccactgtgcatggtgcatggaagtgagctcagaagggatggtttgcatgtcaaggcagaagagttgaaacttgccacattttgtcccttgtattatacctttctggtgtgttagtaaacagaagattccatctccctcctaaggatggtgagctgcatgaaatgtagtctgggtccaccatttcctccaagagcccttgctgatcctcagcaaagatccccaaccattacttagcactaaggacaatggaccttgagtgccttggagaggggccagagacaaagatagcttgaaaagtcagtggcccaggccgggcgtggtggctcatacctgtaatcccagcactttgggaagccgaggtgggtggatcacctaaggtcaggagttcaagaccagcctggccaacatggtgaaaccccatctctactaaaaatacaaaaattagccaggcgtggtggcaggcacctgcaatcccagctacttgggaggctaaggcaggagaattgcttgaacccgggaggtggaggttgcagtgagctgagaccccaccactgcactccagtctgggtgacaagagcaaaactctatctcaaaaaaaaaaaaaaaagagaaagaaagaaaagtcagtggctctccttagtgatctgtatccaaagctgtggcttcagctgcaaatacaaacagatgctcttaaaattcccacatggctccttttcatttgtaaatctgtctcaaatttccaaatatttatatgtaaacatgttccaaagcttaaacagacactaaggtgattggcacattaagtatgattagggcacttacttggtatcttttctagatactatcatggtttcctgaacatctaagactggtcgacagagccttacctctcattccatctgaaggttaacacctttacaaattctgggtctgagatatttaatcactgtctcttatgctgtatttcaagtcagcttagagtactcaacttagattacaaactcttccaaggcagcagagttcatatcctaagttttggaccaagattctactgcaaacatatggttaatattttataggtcccttggaaatacttgcatttggcttgaaatatctacagagcttcctaccaacagtcagcaattctatctgttctggctttcagagtttgaacaggtcaaatataaggagtgtgtccaagcttctcctacaaatctgatcagtttaagcacccatggtaagacttctgatgtaaggcttctgaaactccccatgttttcctaggatgatggtggcgtgcgtttacagagagctaactatgtgttctatgcatcaggctctccactatgtattcgcattagcttactttgtttgaggatcaaattattatccccattctacaaataaagaaactgtaactgagaggttaagttctttgcccaaggacatataaggggtaaccagaataaaatcccttggagacatgctgccacaagccaaggaacttccagaaactaggagagaatcctgaaacagatccttccccagcaccctcacagggaagatggccgtgcaaaaccttgatcttgaacttctggcttccagatttgtgagacaataagcttctgttctttaagctgctctgtgtgtggtaccttgttacagcagccccagctaactaatatatggcttgaatgtgtagctttaacatcggagagggcctttcaaattccttaattccaacaaacagaggactccacagtcaggtactgcaaatttgttacttaatgtctttaaattctgaatccacctttgccaagactatgtgcacaaaaggaaaaactgtggttaccttttgtaacaagttatataaataagaactaaatgaccatgttttcttttctctcttctaattacccaaaggttaacatgctattttaaagtttaatttaatttaattttgcagcttacccaggtttaacagttatttgcagagaataatcagaaggaactgcaactggtgtttaatgcaaataaggccaggctgctgaactagggatgactcatgcaggccttgtgcaaacatctagtctgatttgcatttaagagaaaaggtacacctatagaagtatccaacatgtattaaaacatcttcaaaatgttttggagttttaaagaagtgcccattaaagatgctttctgctccacctcttaaaaaaagcatggccccaggaaaaatgataatgtattctagaacttttttctgctgtgatattttctcctcccaatcaatgtttgcttcccctttaaaatctctgtgtactttcatgggtgcagtagcacatggtgatgagggcttgggtttgattgagcaatgctcaccccatctccagcccctaccccacaaaggcaagtagtacagagaatatatatacttatgattctgacataaaataaaatgtaaagccaatcaaaatgtttgcatattttttgcttttccacattccccttctccatagacctagacttcaatcaacctgcatctcctataaagagaaaatgactctcttgaatgcaactggactccaatgaaaacaatcctctttaactctcttgttatcataatactatttataacttttactcaattaatgttattataagctcttatatattcaacatgttaccaacctgaaaacttacccccgaattaacctgatttaggtgaagacaccctatagaactctgagttgagtcaggaagattgatccattatttaggaaacagagctcactgtcattgtcccctgtaggtctagggaggaagcaggctctggctgaattgtctagaggattctctcccttccagcaaccaatctccttcccaccccatctccactcttgtgagcaaaccttcagctgtccatcaataaatcatgccagggataaattcccaacaatagcaaatctaactggcctcaacttgctattttaacactttgatcctaacttccgagagctctttttaaaaagaaaggaaaaaaatggaattagtgtaagaatagagagaagagcattaaggataaactaggggtttagtgccgggtgcagtggctcacacctgtaatcccagcactttgggaggccaagtttggtggatcacttgaggtcaggaatttgagaccagcctggccaacatcatgaatccccgtctctaccaagaatatgaaaattatccaggcatggtggcgtgagcctgtaatcccagctactcagaaggctgaagtacaaaaatcgcttgaacctgggaggtggaggttgcagtgagccgagactgtgccactgcactttagcctgggcaacagagtgagattccatctcaaaaaaagaaaaagaataaactaggggtttaaatagtccctaaatcagcaatcagaaataaatcaagagtacctgcacactgcacaactcaaagaaaattactgaaaagcctttaaatgtcacatggatttgaactttactattagatatctggagctaattaaaatattttcaaagcatgttttaaaagtgctctgaatagactgtgctctggatttacatgatgccatcctttcaaatatttcggagttgtgacataggctcttctacaatattcatcaatgaaaaactgagctacactcaagagcaaaagctggtgtttgggccacaaaacggtcacctccaagtgctccgcagctaggcctgccttatatatcagttcctaggctcattctggctattgccctacccatcctcagagtccaacctactcttttcctccttcatcttaacagacgtgtctacagtgaatttgtgtcttagttttccaaagcttaaacctcaggtacagaaaacaatgttgcactaaccatgacagctaactttgtgcatgtttgcatgtgtcacatgagtatttaaatattatcaatgtttggctgggcacggtggctcatgcctgtaatctgaacactttgggaggccaaggcgggtggatcgcttgagaccaggacttcgagaccagcctggccaacatggtgaaactctgtctctagtaaaaatacagaaaattagccgggcgtggtggcgcacacctgctataatcccagccacttgggattccgaggcacaagaattgcttgagcccaggaggcagaggttgcagtgaggagagactgtgccactggaccccagcctgggtaacagagcaagactatctcaaaaaataaaatagaataagaaaataaatcttatcaatgcttgttatggcttaaacattagtaatttaggctatcaataaggaatgttgggctaggcttgtggctcacacctgtaacccagtactttgggaggctgaggcaggaggatcacatgagctcaggagaccaggctgggcagtatggtgaaaccacagctgtacaaaatatatatatatatactaaatttagcagggcatggtggtgtagctgtagtcccagttacttgggcagctgagggaggagtatcacttgatcctgagaggcagaggttgcagtaagccaagatgctgtcttgaaaaaaaaaaaaagggaatttattttgctgtctggaccaaacacaaaatacaattacactcaccatactctgaaatcagaatcaatgactctcaagaaacagcttccataggtcaaatggggatctacaaggcttccagattatcttcaaaatctgttgatagacatttctgttgtgcttcattatagaaattactagattttcacatatgcgttagaacttggagaggctctatctgctctgactgtgcccattgcaggccccaccctagctccagccaccttctgctccctcacaagtacactcacaagggcagctaggcagcttcattccttttccaggtcctcaaatcccgatgtaatgtctttatcatttgtactttaacaacttactgcctgaaccattctttgcattatggcttgtattgtggttgtttttgtttctaacagagtaaaaatccaaaggtgcaggcaaggcatggtggctcatgcctataatcccagcactttggagggccgaggtgggcagattgcttgagctcaggagttcaagaccagcctgggcaacatggcgaaaccctatctctacaaaaaaatacaaaaattagctgggaattatggtgcgtgcctgtggtcccagctacttgagaggctgaggtgggaggatcgtttgagcccaggaagcagaggttgcagtgagccatgactgcaccacggcactccagcctgggcaatagagtgagaccctgtctcaaataataataataataatgataataataataataataaatgataatctaaaggtgcaagatcatggcctattcctcttatttctcaagtggggcagaatcaagaaatggttaagggctcctgtctgaggttagacagataggggatgaaatcccagctctaaggcctgctacctgcagaagcttgggaaaaatattcttagtaagctcctacttctccatttataacatgaagataatggttaccttacagggtccttgtgaagcttaatcttgatcccatgtaaagcccttagtagcatgcacagtatgtggccccagatatccactgagtgaggcattccagtgattcatttcatcagaaattcagtaacacacacagatataattcttatatttcccccttcgataaagcttagtttagtttattattaaccatcgtaaacctgaaacatcagggaactgaagttttcaagtgaaaaacagagtaggaaaacaataaaaacttttataattgcacttcacagcttgcaaaagcttttcagataccattaacatacttatctctaaaacatcattgaaaagtagattattttcattttattctctgcaatagctccattgcccagaacagcatgtaacacacagtagaactttcataaagaactaccaaatgtagaatcaagctcagagttcaaggctgtatccaggttctcagaaatgacaagatgtagaggaaccagaaccagatcttagcatttgaatccaaatcctgcatcctttctcctcaatcacactgtctccggcccccagggtaaggttccacagaactgtaattatttaagacattctatattttctagatgacaataacttcaagataagagagtagagtgcttaaaaaaccccgattaaagaaaaaaaagatctctcttgtgtcaacaagggaagagagaaccagtaatataactacttggatacagatttttgctttcctcaaagtatactcagcaaaccaccttgatcatggtatgaacaagtgaaacaaaccacatttcaaaaccaggttgaatgaaaagatgcattggctgagcttacttggaaataatatggaaagagaggaagtggacagatctatagataaaaacaacattggccttggccatgaacaagggggttcattttactatttctacatgtgtttgaaatctttctaaattaaaacaaggcaacaacaacacaacaaaaactctccttcacataaaccaatgtattaacatgaggtcaccactgtgtaaagcacatgtgtactaatcaccaacacaggctctgaagggaacacatgctttatgcagccattggctccatcttgaaaactcagatattaaataatcttttcatagacagttaagaggagattattttaaaaaatgaaatacaggccgggcacagtggctcacgcctgtaatcccagcgctttgggaggctgaggcgggcagatcacctaaggtcaggagttcatgaccagcctggtcaacatggtgaaaccccatctctactaaaaatacaaaaattagctgggcttggtggtgcacttctgtagtcccagctacttgggaggctgaggcaggagaattgcttgaacctgggaggcggaggttgcagtgagctgagatcatgccactacataccaccctgggctacagacagaacaagactctgtctcaaaaaaaaaaaaaaaaagaaagaaagaaaagaaaaaaaaaaagatacatctgaatatttaataaagtgaaaatgttatagaaaactataatgttttatgagtcagggccactccatttgcattggacttgaggaggcatatttcttctttggttaaacaggaatatttagcatttacttgttctttttgtgcattacaatttttttcttttaagaatcagtttcagcctggcacaggggctcatgcctgtaatcctagcactttgggagcctgaggcaggtggatcatttgaagtcaagagttcgagaccagtctggtcaacgtggtaaaaccccgtctctactaaaaatacaaaacttagccaggcatggtggcacatgcctgtaatcccagctactcaggaggctgaggcaggagaattgcttgaacctgggaggcggaggttgcagtatgccaagatcacaccactgcactccagcttgggtgacagagtgagactctgtctaacaaaaaaatatatatatatatatattatgaagtaatattgctgttcctcagtttatcatctgtaaaatgagtaaaaacaatagcagctgccttttacagctgctgtgaggataaaatgattcaatatatggaaagctctggaatagggcttgacccaaaggaaggctcagtaaatattagctgttgtttttcttatgtgagataattaaatactaggagaagaaacacatcaccaaattgacacttcagggacagctgagaagttactacagcccacgccggggctcaaatttactttcgtgtgttgaatcattaatagcaagggaaatacctaactcgtaacctactgtctcaggccacaggaaaatgtcaccctagtagtgagagagatattaaatattttactctaccagctgctcagagcaaagcagcctggggtgtatccattactgcctttttcagatctcctgaaagatgtcacaaaccccaaactctggaatttagaatataatatgaacaaggcaacttagagttggtatctttgcatagtgagtaaatgtggaatttttcagaatgataaagtggttttgtttatggtgtttgtttttttaagaaatagaaattgtctttacatctgacacctctgccacaatatccagtgtatatcttgccaataagagacacattacaccagccagcctaaaatagtctcaggttgtttaccaacaatgtgtaattgtgcattggagaacccggggctgaaagtattcatatattcatgttacactcccatcagatttgccttattaaatggttctaatgctagcatcctacataaatggcaaaattcatgcattatataataacatcaacatttgggaagggaaagattataacagacactgaatctcttaattttttctctaccaagataaaaaaaaaaaatcctggacatgtgcttgcttcggcagcacatatactaaaattggaatgatatagagaagattagcatggcctttgcacaaggatgacacacaaattcatgaagcattccatttgtaaaaattaaaaaaaaaattaaaagccttgataaaatgtcctgcggatttgacagtttcacattgacgcttaatcaagttaattcttgattatttgtgtgtttactgactgatgtagttattatccatgaatcccaggctctggtcagctgcctggcttcacataagtttacacaggcaaactcccaaagggagcttttaacttttaactgtttaaaaagcggttagaggtgatcaatattctaattgtttccaggccttgaaaacagagaatcctatattctctcctgttctctacagagtcacagcagtgcaattccaattcaatccaatccccagccataacataattaacggcgcagcactgccagggacagacagatgaagagggcttgcacgcgcccagacaccaggctcactgctgaaccatttgagcttaagttacatatagttcattatccccctttacccctaaatacttcaggggtagtctctcacattctcttacataaccatagtagaattatcaacttcagacaatttaacattaacattcacagttatctaatagtctgatttcgtcattgacccaatgatgtcagttatagtattatttttcctctagcacaggatccagtctagaatcaggtgttactttaggtagccatgtcctttaatctgaaacatttccacaacatatatatatatatatatacacacacacacacacacacacacacatatatacacacacacatatatatatatgaaatatttacacaacatatatatgtgtgtgtgtatgtatatatatatatatttgagactgagtttatctctgtcacccaggctggagtgcagtggcatggtcttggcttactgcaacctccgcctcccgggttcaagcgattcttgtgcttcagcctcccaagtagctgggattacaggcgcctgccaccatgcccagctaatttttatatttttagtagagacacggttttaccatgttggccaggctggtctcgaactcctgacctcaggtgatctgcccaccttggcctcccaaagtgagattacaggcgtgagccactgtgcccggcctccacaacctgtatttgtcatttacaacactgacattaaaagaatatggtattccttctctctctctctctctctttttaaaactgaacctcccacttttgggctttctctgtcatttcctcgtgatttaattcaaggtctctgttcttgctggaacatcacataggtgatgctgcgtcctttcagatgtgacatctggaggcacgtgaggtctctgccccttgtcggtgattgcattttgattttatactttggtcatgtggtcaacgtgttgtttgatttctccactgtatgtattttttgaacttgtaatttgtggggagacacttttaagacatcgcaaatgtcccgttccttatcacaatttcctcctaaacgtgacactcatggatgattctcccctgatccagtctctactacaatggccatgaaaggatgatttcacagcacccatcccctccacgcatattggtgagcctgagcatgccgctgtaagcatagcctccctactttccacttattagttagtaatcaatatggatgtgtaaattcctattttttctccaatggcatataattccttactgtccataattattttggtgtccacatggtccctggtttggccaatcaaagcactttcaagctagcactgtgtccttgtgacaggctcccatcattctttcagcatgtccataccttgtgacaataacaagatgttccaggctcaagttgtacctctcctgccccagcctgtaatcagccatttctcccagtacccctggttcctttgaatgggaaatgataatagagaccaagatcttggcacttgatgtgcttgttactagcggggtgactttgcttcttggtcctggtcctttgatggatagagctaagtaaaaaatgtatacacacacacacatacatatacacttatgcacacacgcatgtacatgggaatacttatacatgcatgtatttcagaaatcagttcatacctattcttctgattccaattgattcccacaatgttcttttcccccatctcccatttcctttctatatgttccttctttctcagtgagaaccctggctctccaaaacaataactcatttgctcaatgctaaaatacatctaaaactgtttcagagttgctttgccagtatcactacataaagtatatcgtaagagtttaaaatttctttgcgagtttccctcaccacccaactttagacaagatggagcatatctcatagaatactgtgttcgtagctccctggattatttctttttctcccctcttcactgtggttatggaattcatttgaaatacaactgggtttcttcatttcatgttgctctcagttttaggatttcccctatccctattatatatatacttatatttaaatataacttaaaaaaatagggatgggggtctcaccgtgtagctcagactggtcttaggcgggaggatcatttggtcctcagctcaaacgatcctcccacctcagtctcccgaagtgctgagattataagcatgagccaccaagtctggccccatccttgatttaaatttatttttgaatatgtaggacattaacaggctccccaaagccaaaactatgcaaaagggtgtcttagacaagtaaccctcctcacatatccccttctccttgttcccacccaccctttgttggtaatcgactttactgttttctgtttatccgtcctgtgtgttttacaaagataagaagataggccaggcgcggtgcctcacgcctgtaatcctagcactttgggaggctgaggcgggtggatcacctgaggtcaggagttcgagaccagcctgaccaacatggagaaaccccgtctctactaaaaaaaaaaaaatacaaaattagccaggcacagtggtgcatgcctgtaatcccagctacttgggaggctgaggcaggagaattgcttgaactcgggaggcagaggttgtggtgagccaagatcgtgctattgcactccagcctgggcaacaagagcaaaactctgtctcaaaaaaaaaaaaaaaaaaaaagatagttgtatttttccttatgtttccttttttcttttacaaaagtagaaaatatatgttcttttgcacttagcttttttcacttagcaatatctcctataatcactagaagtcacttctcaggcaactgtttgcaagtagagaaatatttatgtcttatgtctatgtataaatcattttcctggaaaacttaaaagaaatccataggccgggcatggtagctcacgcctgtaatcccagcactttgggaggttgaggcgggaggatcacaaggtcaagagatcaagactatcctggccaacatggtgaaaccccatctctactaaaaatacaaaaattatccgggcgtggtggcacgcccctgtagtcccagctacttgggaggctgaggcaggagaatcgcttgaacccgggaggtggaggttgcaatgagctgagattgtgccactgcactccagcctgggcgacagaacgagattccatctcaaaaaaaaaaaaaaaaaaaaaaaaaaagaaatccatagatcccacgatggcttgcttccctttctttctctgttttccaagacagaagtcctcatctaccaccctaggtccttaaagtctagctttcctttaaagactcaactttaacctaagggtagcatattactgcagtgaatttatcaacctctaggcgagatatttacaactccagggaccttccctaagcaaaatttcaatctaaggtgatagctccaatagcagcaaccaagtaaatattcattgagaatttttaaaaaatcaccttgtgaacctttaatccctaacagataatctggtaactcatggcaagtggtcatcaaagaaaccaggaagggccgggcacggtggctcacgcctgtaatcccagcacttcgggaggctgaggcgggcggatcacgaggtcaggagatggagatcatcctggctaacacaatgaaaccccatctctactaaaaataaaaaaaaaagaattagccgggcttggtggcgggcgcctgtagtcccagctactctactcgggaggctgaggcaggagaacggcatgaacccgggaggcggagctttcggtgagcaaaaattgcgccactgcactccagcctgggagacagagcgagactccgtctcgggaaagaaaaaaaaaaaaaaaggtatttggatgactcagaataggccaccatcgctgttgggaaactcctagtcctgccctgtgcaaaccaactgcagcttaattgtctctgactggcaattgctaccaccctcctaccattcccatcatgtaggagagctgctaggaggtccactcactttgtcactagcacccaaattcaaaggcactagaaagaagctatcactccaaaccctctacataccagcaagaaggaggttggtgctgcagtacctggatattccaaattggccaatctctcccaatctctccaatatacaaagatcggggggaaaaaatgactaaaaattatcctcccacatagtgattttaattcccggtagaaatgtaagtggaaggaagccaaagatgaattcagtacaataatatcatgattaacaaagtcttgggatgaacatttcatcaacacaatcactctgggataatgcctgggtggatgagatacttgagtagcttctgcttctacatgtcctagaaccagcagagggaaagggcctgtccctaagacccctccagctgggaacagagcctgcagccccagagatgcctgaggaaccccctctgtggccagcctatctccaccttcgtctttgctcttccaccttccccaaactgaacatggtttgttttaagggaaagagcagctagtggcttccacaagatccagcccaaaagtaatgcacattctggcacttaacccgaatctcctgcaacctcttctcatcttcatgaagcttctgacaaggaaatgtggctatactatatcctcctctttgttcaccaaggtaataaggaagatactttttatttttttatttaagatggagttggccgggcgcagtggctcacgcccataatcccagcaccttgggaggccgaggtgggtggatcatgaggtcaggagctggagaccagcctgactaccatggtgaaaccccgtctctactaaaaatacaaaaattagccaggcatgatggcgcgcacctgtagtcccagctactccagaggctgaggcaggagaatcgcttgaacccaggaggcagaggttgcagtgagccgagatcgcaccaccgccctccagcctgggcaacagagcgagactctgtctcaaataaaataaaataaaataaaataacataaaataacataaaataaaataaataaaataaaataacataaaataacataaaataaaataaataaaataaaataaaataaaaaataaaataaaatataaaataaaataaaataaaataaaataaaataaaataaagaagccctgaactcatagcctcaagcaatccttccaccttggcctcccaaagtgctgggattataggcgtgagccattgcacccagactgtgttgttgttgctatcagggcaactgtgatatttatcttaagaaagttttagattcaaatgcagtggcctctctgaagattcttgagataagacaaagagtgggagagaactattctctactctagcatggcaccacgagcagtacggccttagcaagtcacatcctcacctgggctcaggttatcatctgtcagtgagggttcttgaccagatcaatgattctaagatgtggccacacatcagaatcccacagtgtgcttttaacagcaatagtttgttgaacctgaacccaatctactgaacctggaatggggaacaggtaaagtctgtccctgcatttctccagaagatggctgaggtcctttctggcactaaatctcctaattctataggtttttttcttttcctatttttttttttaatggactaggccaggtacagtggctcacgtctgtaatcccagcactttgggaggctgaggcgggcggatcacaaggtcaaaagattgagacctttctggccaacatggtgaaaccccatctctaaaaatacaaaaattagctgggcatggtggtacacacctgtagtccaagctgctcgggaggctgaggcaggaaaatcacttgaacctgggaggtggaggttgcagtgagccgagattgcgccactgcactccagcctggtgacagagcaagactgttaaaaaaaaaaaaaaaaaaaaaaaggattattactgaatagttttaggtttacggaaaaatggagtggcaatccccacatatcctttcagccccgtgccttagtgtacgctgttcacatcttgcattagagtggcacatttgttacaactgatgagccaataatgagatacacacacacacacatatatatatatatattttttttttcttttgagacagggtctcactctgttacccaggctgtagtgcagtaatgtgatctcggctcactgcaacccccatttcccaggttcaagcgattctcctgcctcagcctcctgagtaactgggactacaggtgcccgccaacacgcctggctaatttttgtattttcagtagagacagggtttcaccatgttggccaggctggtcttgaactcctgacctcaagtgatctgcccgcgtcagccccccgaagtgctgagattacaggtgtgagccaatgtgcccggccccagtaatgacatattgtaactaaagtccctagtttacatgaagtccacagttcactagggttcactctttgttgtgtggggtttggcaaatgtatagtgacacacatggtacctagttgaaagaatgccctcttgcattaagtcttactctcaagagtggaacacacagtaaaggcagaagaggagagcaataggctgcttatatcccgtgatcctcaagtgatgacaaatcgaagatatttacagtgaacagtggtgcatgtgcccagcaccataaacatgaacctacttacttttttgctttttcattgttcctttttaacacttggaatatctttcctacagcaatactctctgttacttaaactaccaaacccattatctcctgatgaagcaatgtgcttcccaaacgtagtaattcaaggctgtgtctttacagccttgaacaatcttttaaaaatctgagacatagcaaccagatgttgatagagattacttctcttgatccaaagataactggcacttggagttctaagaaagtcaggagttcaaagaatgagaatctaagtgagggaaaatgaactccttgaacacacgttttttgcactgttatcaagtcatttcttaggattgattgtcagaatgaaatggttgttaaaaaattgtactctaggccgggcgcggtggctcatgcctgtaatcccagcactttgggaagccgaagcgggcagatcacctgaggtcaaggttcgagaccagcctgaccaacatggagaggccctgtctctactaaaaatacaaaatcagccgggcttggtggcacgtgcctataatcccagctactagggaggctaaggcaggagattcgcttgaacctgggaggcggagattgcggtgagccgagatcgtgccacagcactccagcctgggcaagaagagcgaaaccccatctcaaaagaaaaaaaaaaaattgtactctaaagatagagctctgtttccacaaattgtatcagaaacgagaggtaacatttcaacatttaagctttcatatgcatttatttttcaaattccaacaaacattttcaagtttgttagaactaaacagaacctactagaatcaattctattgatgtcatttcttttaacatagcaacttatcacacaataagtactcaatgtctgggttttaattgaccaagtaagtaaattgaagaaagtttggaaaactttctcttcctctgacacaattcttcactgttcttttttttggggggcggggggatgaagctttgaaaaatttatttttgcataacataaacatgtcaatctttccctttagctccttccactcctccttcagtgtgccgaagagatactgagttcttccagatttttgcttagctgggtagtttctaaactcaacagactctccaggtaggtagttcctgcacggggctttcctgtcactggatctatgacttttccaactttgaaaatgatcttggcctgttcatgtttcacatgcttcgttcatgggacaggtaaagctctgagaagcacgatatccccagctgtgcactgccgaaggccatcgtgaacaaaggaggttttccacttattataatactttaataaatagggatccagaacaagcccggtcactctcgctttagcagtcttttgtatttttgtcccaatcaccttccccacgatccatctggcatggacagatgaacgaacgacggacatgatgtggctttggtcacctccgccatgactgtgcagccacctgccccagggagcctgccttccttccttccttctttccttccttccttccttctttctttcttcttttcttccttccttctttctttctttctttttctttctttctttctttttctttctttctctccctctttctttctttctttctctttttctctctttctctctttctttctttctctctttctctctttctttctttctttcataccgagtcttgctctgtagcccaggctggagtgcagtggtgtgatctcggctcactgcaacctctgcctcctgggttcaagtgtttctcctgcctcagcctcctcagtagctgtgattacaagctcctgccaccacacccggctaatttttgtatttttagtagagatggggttttaccatgttaggcaggctggtctcaaactcctggcctcaagtgatccacctgcctcagcctcccaaaatgctaggattacaggtgtgagacactgtgcccagcctgacactattcttgaattaacttttcactttcagttgtcaaaaaaaaaaaaaaaaaaaaaaacagaaaataagtgttggtgaggctgcagaggagttgaaacacttttgcactgccagtgggaatataaaacggtgtagccactgtggaaaacagcataatggttcctcaaaaaataaacatagaattaccataggatctagcaatctcacttctgggtatatacccaaaagaattgaaggcaggaatccgagcagatatttatacagtagacccatgttcacaacagtgatattcacaaaagcaaagaggtagaaacaatccaaatgctatctgataactggatacacaaaatgtggtatagagacaaggaactatcatttggccttaaaaaggaaatcctggcacatgcataaagacatgctaagtaaaataaaccagtcacagaaggacacatgatgtatgatttcacttacattaggaatgcagagtaggcaaattcagagacagaaagcaggatgatggttgccaaaggttgggaggaaggggagttgtttaatgagtgcagagcttcagttggagaagaacttctggaggtggatggcggtgatggctgcacaaccatgtgaatgcccttaaagacactgaagtgtataattaaaaatggttgggtcgggtgcagtggctcatgcctttaatcccagcactttgggaggtcaaggcaggcggatcacaaggtcaggagttcgagaccagcctggtcaatatggtgaaaccgcgtctctactaaaaatacaaaaaattagccagacatagtggcgggcacctgtagtcccagctacttaggaggttaaggcaggaaaattgcttgaacccaggaggtggaggttgcagtaagccaagatcgcgccactgcactctagcctgggtgacagagtgagactctgtctcaaaagaaaaaaaaaaaaaaaggttaaggtcaagcgcattggctcacacctgtaatccgagcactttgggaagctgactggatcatctgagggcaggagttagagaccagtctggccaacatggtgaaaccccgtctttactaaaaatacaaaaattagccgggcatggtggcaggtgcctgtaatctcagctactcaggaggctgaggcaggagaatcgctcgaaccccggaggcagaggttgcagtgagctgagatcatgctattgcactccagctggggcaacaaagcaagactctgtctcaaaaagaaaaaaaaaaatgttaagatggtagattgtatgttgtgtatattttatcacaataatttttttttcttttcttttctttttttgagacagagttttgctcttgttgcccaggctggagtgcaatggtgccatcttggctcactgcaacctctgcctcccagattcaagtgattctcctgcctcagcctcccaagtagctgggattacaggtgcctgccaccacgcctggctgattttttgtatttttagtaaagacacggtttcaccatattggccaggctggtctcgaactcctgacctcaggtgatccacaggcaggagccaccgagcccagataacaataaattttttttaagtactcagttgttctttatctcctttggagaaaggagaagagatttaaactgatttcaactaaaaaatttcctgatcagacaagttgccaaaagaataactggaatttcttctctgactgtgtttctcaagtatctagccaggcagtgtgctaaaagctagggacagtgggaaaccaaaaatcacacatcctaccttaatggggctaagagttcagcccaatggctctgaaactttagcacatatgaaaatcctctggtgggcttgttgagcacaaattgctagcacctacactcaggatttctgactcagggggactgggctggggtccaagactcttcatttccatcaagctcccgggtgatgccagtgctgccggtacagggaccaccctttaagaagctctagggcaggaggagggacttgtaggtaaagaagcagtttcaatcaagtgtgctgtgatgggaatccacccagtatacatactaggtaatgcatccacctgtcctaggagaggtcaagaaagcctttcctagaggaggtgttgcagaaattgaggtctaacctgagacctacaggacatgtaggagtcagacaggtgcatgaaagggacagagcatttcaggtggagagtgtccgatttgcacaggtctagaggtaagaacagcctgttcttgaaattgcaaatctttccatgtcatgggcagtcagagagtgatggggaaagtaatgaataaggaagagagaggtgaggtctatcaaaaaggacgttggaatcctacagtttatccacaggataaaaggaagccaacctcaggcaggcttgcagcattcaagaattgaagctctaagaactaaggtgagctcatcagctccgggagaaggcataggtccagtagagtcgcagactaagcaggtggggaagggggcagttgtacatgcccctctaattctcgcatcatctcacacaacccaagctccatttcctcagaaagccttctgctgctcaggtaagaaaaacccaaggccattgtgccatccagtacagtggccacgagccatgtgtggctattaaattagctaaaattagaagccagatcagcagttgcactagcctcatttcaagtgttcaacagccacctgtgactaggggctagaaacaggaacgcttttgggccaggctcggtggctcatgcctgtaatgccagcacttggggagggcgaggtgggtggatcacctaaggtcaggagttcgagaccagcctcgctaacatggtgaaaccttgtttctactaaaataacaaaaaattaaccaggcttggtggtgcgcgcctgtaatctcagctactcaggaggctgaggcaggagaatcgcttgaacccaggaggcagaggttgcagtgagccaagatcgtgccattgcactccagcttgggcaacgagagcaaaactccatctaaaaaaaaaaaaagcagaacactttcatcatcccagaaagttccctaagccagcactggtccaggaaatgaagtataagcaggattagatctaagacttgccaggcattttggttttactgcctgaagccagcaagcaactggtttgggtcttcactcatgaaaacacacacacatacaaatatatacacagagagctctaaattgatttttaaaaaatctatagggtataaagcaagacaattaacaattatacattatatacagtctacaaatatcctagatatcacttttataatgagatataaggaattctggctgggagcagtggctcacgcctgtaatcccagcattttgggaggctgaggcaggcagatcacctgcagtcaggagttcgagaccagccttgccaacatagtgaaaccccatctctactaagagatacaaaaattagccaggtgtggtggggggcacctgtagtcccagctactggggaggctgaggcaggaaaattgcttgaacccaggaggcggaggttgcagtgagcaaagatcatgccactgtactccagcctgggcaacagagtgagaccctgtctcaaaaaaaaaaaaaaaaaaaaaaaagaaaagaaaagaaaagaaaaaaaagaattttcttaagctactaagaagaatcctagaatcatacctattctccaaagccatctgtaaatcctaaaaataaccagtcaagggaattgagggaggaaaacatagtccagattagaattctaaaaggccatttttactgtttacatgccaaaaaaaaaaaaaaaaagctaagcttttaaagctttctctattgtgtattttaccaaagtcagtatgaaggattcaaaatattacatagctaatccttactccaagttctaaaaataaaatgcaagagacggttgcatgccaagttggtaacaaatccctatgccaaggatagaagtggaaattgatgcaaggaggaaatgagttatgctgtaaaatgaaacacacacccaagagaaaggcttaacccttgggctgaccatagcagcaaacactgtaaccagttaaaaagtccaagaagccagaggtagatgataattctacaaattcagagatgttcttgttttcccagctgctccacaaggactttaccagcctagataaacagagcccgccttccactttccatgaaggatcaggtgggcagcttcccagtgagtaaggtgggtggctgagtatccttatcttgatggtgagtgacaggtggctttgggaagtgtactcagacaggacagcttccttgctcaaccgtggtctgacccaggcatattaaggggaggaccagctcagaaagaaagcagagccaagtgtatgcattgcgcaaaacctctgatggccaggaaggcctggccgccattccctagagccacgcattctgcctgccccacgactcttccatcctcagagccgtatttcctcctgggcctgccctgccagatctgattggctcccttctccctgctctgctattaaatgccttccttgggttcaaataaagctagtttctctagagcctttctaggtatgcccgtgcgccttcccactccaaacccactgtgaatggaagaccattcattcaccaattcctcatttagttaaaaatcaagacccaccagcaagaaactcagtgcaaggctccttggaggtgctggggtaaagcaagaaactgctagtacttcattaagccagtaggcaactggtttgagccttaattcatgaaaacacacacacttcactctaaattgatttttaaaatatcataaatgccatcggactatctcaaatggcaagaaacggccaaagatgactccagagtagataattgaaatggatgtggggaaagtaagctcattcaggagcactgagcctggggcatcccaaatgcacagcaaatagtagatctgatcgaagaacttttatttgtaattctgatttcataatgtattaatgatagcaccagctagcatttattgagccaatgctatgtgtcaagtaccataccaaacatttaacacacacaaatgcatttaaatatacaaggatccaataaggtaggtcctgttattccccttgtataaatgaagacactgaggtcaagaaacttgtccatggtctcacaagtgtgcggtagagtccagattaaaacccagccagcccagcatcctgctcataaaaccctcatgctgagaactgctgaactgcatttttttttttttttttttgagacagagtctcactctctcactcaggctgaagtgcagtggtgcgatctcagctcactgcaacctctgcctcccaggttcaagcgattctcctgcctcagcctcctgagtagctgggactacaggtgcatgccaccatgcccagctaatgagaactgctttttcttgcactcaggcagaagtgcctcagcctagcaagcttccctaggtgcccacccaccccagctgccaatgggaaccgcagtccaatatttcacatttcggttagatgtctcaaaatttgtttagcactttccagagcagtccacaaaatgccacttgccttgacaggcctgtgttctatatgcaatggcaccacagaatttagttaccatccactttgcctccatccagtttgggatcttcctcactccgtgagacacaaggctcctttctcctgcctccagccggcccaccctcagaacagggtacccctggagccaaattgttgaggcaggagctccagatgggtagaaatgggatagaggagaaggagaggctgagacagggactttgagatgcactgcaagccagccagtggggaggctaccccttgggggcaaaccacacgcaggggacaggtatactggggcttgcctactgcggcagatcgcaagttcatggcaatatacctgtaggtgaaaacatgtcaacatgccccaatgttaaggacagaacagcaaagggacagtcagatacgagttaaagtcaccgttcttctagaaacatggatgtgaattttgtttgttttgttctgtaacagagtctcgctctgtcgcccaggctggagtgcagtggcacgatctcggctcactgcaacttctgcctcctaggttcaagcgattctcctgcctcagcttcctgatagctgggattacaggcacgtgccaccacacctagctaatttttgtatttttagtagagacagggtttcaccatgttggtcaggctggttttgaactccttttcaagtgatctgcccacctcagcctcccaaagtgctggaattacaggcgtgagccattgcaccctgcctggacttgaatttttgtcagaaagagatttgcaattaatgctgattgcaactgatggcagaattaagatggtaagtcttatatcacaaccacctcctaaaatcaaaatggagctgtttctgtaggagtcagactacctcctttagaggatatgggagtagtccatcactcattcagacagttttattaagcgtgatatagtctacctctctcagcactgggcgtggtgcatctcctattgttaggcaattcccttacttcctgatccttcaattcacttacttcctgatccttcaattcactttctttataattacgaaatggtctgagataaccaggttccccttgctcaagcttccaaaaatcaggctgacaagttacatttggacatctgctcttcaaaagccaaaggcagagttttctgttaaataatgagctgtccaagcatattttgattcattcaggccacatacagcagcaggagtttctgggtggtgcctcaggtctaaattttactgtaatcctacaggttagaaatcaatgagctgatcagaacatatccagtttccaaagatatgagtggcaccatcaatataaattagttctccagtaatgtcaaagggcacacttagcagtgctgtcagaacaaccagaaaaaccacattcaaaagggaacacagcctaaggcacacaactcatgataaatacctgggaaaaaaccagttagctctgcctttagctgttcccaccccaattttcacgattaaaactacaatcgacatactaattagtcggcagacatctctataatgtttatactcctaaaaaacatgttatgttggttaactgaacctatacaatacttagaaatctccctaaagttatcctaaaaacaaaacaaaaacaaaaactttgcaagctttctgagttcaaacctgtaattttgttacctatcagtgctttataaaagagctaagataattataaggaacaagcctcctaaaatgtaaaattccattgttcctctactacccgcccatcagtggcaaataaacaccttaccatgacattcactgtgagtattgctagcgggagaagtggaggagaaagcagtcaattatacctgatgatcagggatggagagagacaggagggatgctgagttggccttgaaggtcaagtcccaagctgggccactatctgattgggagatagaaagtgagaggagaaaggcatttctggaaagaaatccctgggggcaaatattctgcagcactgaaggcacacaggattagttcagttactaaagtgcgggtagacaggggaggaagaagaagagagttggaagaggagactggaaagcagactgaggcaaggctgggaaggccttgggtgctagcggcatttggaatttgtgtgctaagcagggagaggccatctgagttctcccatgcattgagtaaacaacacgtcccgacctcgtggcaggtattcagtcagctgctggtgagcaacgtggctcctgtccctatgaagcttaaagtctaaggtaaggcagaccctaggaattcggcgcacagaagcctctctgctgtgatggagaagtaacagggacgatgaggacatagagcagggaagggggcctaggaagctattctggaagaagtgagttggttcctgaagttgaagcacctgcagaggtgaggaggtggggagcagaagtgcaggatccatctgtgcaaagaggctggggcctcaacaacatgaactgttttaatcagatttgcattttagaaatgataaccctaggcctggagcggtggctcatgcctgtaattccaacactacgggaggcagaggctctactaacaaatctctactaaaaatacaaaaattagctgggtgtggtggtgcatgcctgtaattccagctactcaggaggctgaagcaggaaaatctcttaacacaggaggcagaggacgcagtgagccaagatcacaccattgcactccagcctgggtgacagagcgagactctgtcttaaaaaaaaaaaaaaaaagaaaagaaagaaatgataaccctgaccaaggactccaggaaaagatggtgttaatctgtggccaagacaagagtgcagaaagtccttactgtcctctggcaacaggggccaaaggcggaggctaataaggtggtgcagacagaaagggtgggatttctggcagaactttcagaggcagaggcagcattttacaactcacttcatccgggcagggggtctgggaggaaaaacattgaaaaaggtgcccagtttctagccttagcaactgctgcaggcagctgaactctgcaagggttcttatttggccctgacattctatacgcacttattagcattttattcaagaagagggtggttcccccaaatgtttccatatttagccaaaggaagctaaatttcaaacttcaagtgtctactcaaacctaagactgaacccctcaatttccctcataactccattatcccccaggcttcctcacgtcagtaaaaggcaaccccatctcccaggtgctcatgccaaacacctagagtcatgctggagtctcatcttccctcctaccctgctccctattcatccgtaagccctaggctctgccttccaaatgtttccagaacctaaaacctctcctcacctccctgcaagctgcttggctgaagctctgttctccctcacccggattagaggtagccccagacagcatgcccttcagtctagctccaacatggagggcaggctgattctttccaaaggtaatcagatggagttactcctcggctcgaaactctgcagtgggttctcacttctctcagagtaaaacccaaaatctacctgctctctttccctctcatctacagccaccctgctgtctccctggtcctggagcttggggccacacagtgtctgttcctgtacctggaatgctcttcccccgtagccacaaggcttagcccctcaccttactgtcctagctctaatgtcacctttttaggagcccaatcaatcaccaccatatttaaaccccagccttgccagtcccccttctttacattgttgtccatagcacttctcatctgctatcagactttaaaatttattaggctgggcacagtggctcatgcctataatcccagcactttgggaggccaaggcaggtggaacacctgaggtcaggagtctgagaccagcctggccaacatggcgaagccccgtctctacaaaaatacaaaaattagctggacatgatggtgtgtgcctgtaatcccagctacatggtaggctggggcaggagaactgcttgaacctggaggcggaggttgcagtgagctgagattgtgccattgcactccagcctgggcgacagagtgtgagactccatctcaaaaataaataaaatttatttattaataatctcttctaaccggaatgtacactcccagagcaaagggatttttgcttattttgtttagctacatccccagcacccagaatacagtacaatgtacggtaactatcttacagatgtttgttgactgaatgaaaagtcacctattaataaggctccctgagtcacctggacaaaatagtaagccctcacctcttttgcccttcatgcttatttatttttccttgcatatatcatcaacgtgtgataaatgttaataccacatattagtgtgtttattctcttctccacacaagaatgccaactccataggggcaggaatcttgtctcttttctctttgttgtatgatgaacacccaggacagagcctggcacagaggagatgagaaagagaaggaaggagagacagaggtcaggtgtggtggctcatgcctgtaatcccaacactttgggaggccaagaggggtgcactgcttgagcctggagagttcgagaccagcttgggcaacatggtgaaaccccgtctctacaaaaagtacaaaaatagtagttgggcgtggtggcatgtgcctgtagtcccagctacttgaaaagctgagtcgggaggattgcttgagcccaggggtcaaggctgcagtgagcaatgatcatgtcattgcagtccagcctgggtgacagatggagaccctgtctcaaaaaaagaaaagagaaagagaaggaaggagggggagagagacgaaagaaagaaaaagaaaggaggagggaaggaggaaggagaggggcggaatggagggaaaaggagaaggaaagacagaagaaggaagagagggaggaagggagaagggaggaaagagaaagaaggagacagggagtgcggaaagaaatagaaaggaggaaggaattctaactccatattatcaaggtcacagatgagtagcctaaaataaaaaattggttgttctacctagagcaagagattctgtcaggattctgtcagagagcagtgaaacaactggccatgtttttttttttttttttttgaaatggagtttcgctcttgttgcccaggctggagtgcaatggtgcattctcagctcactgcaacctccacctcctgggttcaagcaattctcctgcctcagcctcccaagtagctgagattacagacatgtgccaccacacccggctaattttgcatttttagtagagacggcgtttctccatattgatcaggctggtctcaaactcccgacctcaggtgatccgcctgccttggcctcccaaagtgctgggattacaggcgtgagctgctgcgcccagcctaggcatttctttaaaatctatccattcatgtgctccattagtcaaaataaaaggcaatatctagtaatgatgccaggataaggagtaggctacattggattctaatcaaaggaggcatgagtcactgaaaaaccatcatcatttgttggctgctttcttctatagtttctgaacaataaataagaaggattggccaatcttgttacttggcataataaaccaggtaagcatacttgatgattcaattccatttggaaccgatactacacgttaaggaaacaaaactaacattggcattcagctgagttctgtccaacgaccctttgcctccactgtgtcttgttgggcatgctgctataattttaaaggtaatgactgtaatagtaccacctcgcattcatgtgagttcacgtgaattaggcttctaccactcttgaaagtaattttaattatctcgtttaatgaccttcaccttgcaggaaagaaacagagacatgaagaggttaagacaagtgacggaggtctcagggccaggcagggaaagagtgacttgttttggagggtgggagcccacccacacaatcaaccacagtcacccagatctgcccactgaggtgagagaaaggaggggaaataaaacagcaagcccttttctttcctcctcatatctgttctcaggactcatttcctgtctaactcagagtcaccttagatccttaaaagtgactggaaccaagtcactaaaaaaaaaaaaaaagaaagaaaaaagcaattatttttcacaatgtgaagccttctttgggagaagttggctagaaaataataggagaaaaggctggaacaactgtctaggacatttcctaatatgttattttcaccccccttccctcaaaggtcaacaagatactccactgtggaagcttcttcaaaagcagttcatctggatgtcttcaatactccagatggcttctctaagtcctactccaggccgatcgttatgcaatctgttatcttcctttccaactgttttctcaggcttttttttttttttttaaatagggtatcactgtcgcccaggctggagtacggtggtgtgatcacagctcactgcagccttgacctcttgggctcaagtgattcctcccacctcagcctcccatgtagctgggactataggcatgtgccaccacacccagctgatttttacattttttgtagagatgggatttcgctatgtttcccaggctagtcttgaacttttgggttcaagcaatctgcccggctcagcatctgaaagtgctggaattacaggtgtgagccacagtgcctagccaggctaatttcttatctattgaaagctggaatccaatgcaggaatccaatgcagaaactatgtaagatttcaatctgttatatatctaccatcttcctgagacaggccattgaaagtcaaattccactgtcatttgttccaggggaaaaaagaaacatgaatatatatgtttgtaaacacaaagatgatttctaaaaagataaccaataaactggtgatggcccgtgcctttgggtaggagagttgggtaactgggttaaaaggaggcaggaaaactgacactttattttttatttatttatttattttgagacagggtctcactctgttgcccaagctggagtgcaccggtgggatctcggctcactgcaacctccgcctcccaggctgaagtgatcctcccacctcggcttctcaagtagctgggattacaggcatgtgccaccatgcccagctaattttttgtagtttttgtacagacagggttttgccgtgttggccaagctggtttcgaacttctgggctcaagcgatcctcctaccttggcttcccaaagttctgggattacaggcgtgagccaccttatctggccaaggctgacacttaatacccttttgtacctttcgaaggttgtaccatttgcatgtattacttattccaaaaattaaatgaaaaaacaaataataggtggaacaaaactgaagcttggaaactgtgggagccctttatcaggaaataacaaacatgatggtatcacatcttgactttccagtgatggtcaacaacagaagcatttaccagatagtgagctccccacatgcaagcggcaactttaattgtaccttaaatctttgcccttgtattagttatctgttgctgcctaacaaaatacccccaaatttagcagtttgaaccacaagtatttataatctcagtttctttttctttttctttttttttttttttgagacggagtctcgctctgtcgcccaggctggagtgcagtggtgcgatctcggctcactgcaagctccgccttccaggttcacgccattctcctgcctcagtctcgggagcagctgggactacaggcgcccgccgctacgcccggctaattttttgtattttttttttaatagagacggggtttcaccatgttagccaggatggtcttgagctcctgacctcgtgatccgcccgcctcgccctcccaaagtgctgggattacaggcatgagccaccgcgcccggcctataatctcagtttcaatggatcaagaatctgggtatggctcagggtctcctcccaaggctgcagtcaaggtgtgagccagagctgcagtcacctaaaggtcggcctggggatgatccacctccaagctcactcacagggctgttggcaggattccatcctcttgggctgttggccagaggccagctccagttctttgccatgaatgtctctccatggggcagctggcttctcttacagtaagtgagagcatgagagagcatcagcaagagggaagtggggtgtttctgtgccccagcctcagaagtgacatcccatcactgtggccatattttattcactagaagggcatcaccaggtctaacccctgctcaagggagaggatttcccagaaacagaagaaatcacaaattacacttcacaagaatcctgagatattttagaaaggttccaaatttggccaaaagtagcttaagaaggcttttatggaccaagcataagaagtttagcagggctgggtgtaatggctcacacttgtaattccagaactttgggaggctgaggtgggcagattgtttgagcccaggagttcgagaccagcccaggcaacatagcaaaaccccatctctacaaaaaatgcaaaaattagctgggcatgtgcttgtggtcccagctactcgggaggctgaagtgagaggattgcttgagcctgggaggtcgaggctacagtgagctgttactgcaccactgcactccagcctgggcgacagagtgataccctccctcagaaaaaaaaaaggaagaagaagaaggagaaggagaagaagaaagaagtgtagcagcagagagaaattacttcactcaaaccagcattgagagaggcagagaattaggagcactcacaggcagagctgaaaggctcccagaaggggcaaaaataaaatgtaaaattaacctttgaaatccaaagttggtatcaggtatagcctaatgttcactttttaattttagcaacaccgaacatggtatttctaccttatttttagtataattatccattcttaacttgtgtaatgaaagaaaaaataggggcgggcatggcggctcacgcctgtaatcccagcactttgggaggccgaggcgggtaggtcacgaggtcagcacttcgagaccagcccaaccaacatggtgaaaccccgtctctactaaaaacacaaaaaaattagctgggcgtggtggcgggtgcctgtaatcccagtgacttgggaggctgaggcagaattgcttgaaaactggaagacagaggttgcagtgagccgagatttcccactgcactccagcctgggaaataagagcaaaactccgtctcaaaaaaaaaaaaaagagaaagaaagaaaaaataacaaaaataacataggtaaattaacagttataatattaaacagtctcttttggctaaacctgttataaatcaccacggcatataaatgttagagcttagatgctgaataaaccaactggccttgaagcccacatttctaattctcataacagatttattatgaatctcaaatttcacaaatttgtctgtctgtgtaaaattgttttggaagatgtcaataaatgtagaggaatgtttaaaatctgaagttggaaaaaggtaaagcaaacattagtttttaatcttttgctcacttgagtaaatccttgaaaggattaaaaaatatccaacttgtgaaatttgtttaaagtccttttaaaataaaaatgcataaatgtataattactctaaacctaactgaagactttatagaattcacccaatttgaaaacaggtcttctggcctgtttcccaagtcattatgcacagctgtgggaaacatcctgttgtatgtttacatatattaacagcttcaggaatttcacaattaaaactatggtgggctggtttccaattcaggcagctgggtgagggggtgtggagagcaggcaaaccagaaataaaaacaagcttcttgaaagatgggggaaaggaaatcgtaactacttagtaatcaggagtccatatagtttgccagttctactaaacgctggagggatttcatttaaaccctaagaaatacacttgttcaatcattttgcagccttcaaaatctctcagttggcttcaaccaagaggttgcctgatggaggtaatattgtacacgatatgtaaaaaacttttatttttttctgtggacagtttcaccccaacagaaggaagctgtggtttcacctttctctcttttgtttttccagcatgcctgcccctcgtcctgacataactgattaggaaatgatttctaaatggtcaagagtccagcctcgatagccacttctctgattccaacagaatttctacagaagacaatttccttgtctcagcaaggtatgtatgatatatgtggcctggccaggccggctgctcaaacagagctgtgtttgggtcagcccactgtttaaaatgttaaaatcagacatgaagaccattcacataaccactgctggtcagatatgagtcatctccaagaacaccaaaaaaggaagcattaaatgctgattggtctccttcaaaatcacttgggaaactccagaaagggaagggataaaacacaggaacttctacttcttcaaagtctcccgaggtgatttttaatactcagaagttgggactgagttcctgatctaggttgaagtgtaatgtgaattccattcttgccagtaggtgcgttattttaatcattatctttattcttgagactgtttcactccatctggagacagctttgttgagttttggcaacactgcagagttgttaaaatcataaaacagaaccacctgtttttgagctatatgggttattagaaaaaatatccaaaattctttatttttacaagaggaatccagagctcagaaagattaggggaggtgtgagtgctgaacttgtatttagtctccctgggcctcagtgtccccatctgtaaagtgaaaattaatatattcattaattgatcagttattgaatgcctactaggttgtggactccagggatgaagaagatacgtgatctctcactataacttaaatcctaacacagactgttacagttcaatatgggaaacataggtgggtgcagtggctcgcaccagtaattccagtactttgggaggccgagatgggaggatagcttgatgttgatgccaggagtttgagaccagcctgaacaacataaggatacccctgtctctacaaaagaagaaattttaattagccaggcatagtggcacacacctgtagtcctagccactcaggaggctgaggctggaggatggcctgagtccagaagtttaaagctgcagtgagctgtgtatgatcaggccactgcactccaacctgggcaacagagcgagaacccatctctaaaaaccagtaataataatatttaaaatacagtaaatgccaggagaagacaatatgctcaggttgcagtgggagcttggcaaaaccatacctaacccagcctgggaagcacatgggaggcctctgccatagggcagaaagctgctgcagtgaaatccatttaattggagaatggagcagaaagggcagaagatgcaaagaagccctgctgtctatagaatttgcgaaaataagatgaagcaatagtttgccagcagcaaataactacacagatatgagctatgaaattaagtaagactcatcaaggccacccacagctgctgcgttgcagacgccaatccagcatccttacgttacaccattcatttatttcaatcattttccccataggtttatatctagacatttccataaacccaagtaaattttttattatgcgtgtaggcatcctataaagagtagactcttacattgtctactttccaagccattctctgtcttgactacgcatgagagaatcagccaggtttatcccagactggctaataagactctggcaaggagaactcaggcatcaatgtttttgatgcttcccaggtgaacttgagaatctcatttatcaaaaagtcaagaatgaatggtgcgcacacacacagacaaaaaattcttcagtcacctctggtttatgcatttttagaaaggctccagataatatgaaatctatttgtttgagccttgactataatatgattcttttaggaaaacagatttactgtctaaatgatacctggctcagattaattctagtttgtctctttttttttttttttttttttttttttgagacagagtctcactcttgttgcctaggctaaagtgcaatggtgcaatcctggctcactgcaaactcgcctcctgggttcaagcaattctcgtggctcaacctcccgagtagctgggattacaggcacccaccaccatgcccagctaatttttttatttttagtagcgacagggtttcaccatgttggtctggctggtctcaaactcctgagctcaagtgatctgcctgcctcagcctcccaaagtgctgggattacaggcgtgagccacggtgcccggcctagtttgtcttttctaaagatgcactggctgaagggaggcggggacgttcctagaagtatgatgggtgacagagaacacactattcaggttaagaatgctctacagagagactataaagtagaaactgtaaagattacaggggaaagagggcatctgatggaacgcaggcatggataagataatatttatatatctttatgtttaacaaaagttctaacatgcttactgtggtcctttgaaactgatgacaggcacacaacagggtggacacatatggtttaacaaacaagtcttttttatgtatttatttcctttaataatatagaaagactgtggggaataagaactttaaaaatatcgaatatgcctggtagatgctgccttaagtgaagcaagactcctgatattcacaagaagagacaatataaaaggaaattgaagaccgggcatagtggctcatacctgcaatcccagcaatttgggaggccaaggcaggtggatcacttgaggtcaggagttcaaaaccagcctggccaacatagtgaaaccctatctccactaaaaatacaaaaattagccaggcatggtggcacgcgcttgtaatcccagctactcaggtggctgaggcaggaaaattgcttgaactgggaggcagaggttgcagtgagctgagatcgcgccactgaactccagcctgggtggcagagtgagaccccgtcttaaaaaaaaaataaaaataataaaggaaattaagcattgaagaaaacacagaagccgtctcctctaccatacatcgaagggcgcatggtgacagagctgttgtcatttcaacagtatttctgggcttcccctgttctctacatccttgctacttgaaaaagaaagagtgagcagaggacataactcaggagggactcctactttaatttttactggggtgggcagagactacgctgaagaaatgacatttgggccaaaaggcaaaagataaggagcctttcagaggaagagcttttcaagcgagaaagcagcaaatctgaagttcctgggacaggaagggactcgtcatgcttcagaaactgaaggagaaaaagaatggaatttgcagggggaagccggggtcagggcgggctgggcatagagagctgtggagagaaggtagctgttgttaaaaccacagcatgagctactgcaagggttggcaggatctgagtgggtgctctggtttggaaggggcagggtagaagtgtagccctcatgtaagaaggctactggaatggtccaggagagggaggatgacagcttgaacctcgcggatggcagcggagatagaggttatcaggtggagtcaaggtcttccagaggtagaagcaacaggccttggagacggattggaaatgaaagcagggtgcagtctggaagagaaaggggtcagagatcaagtccaggcttaagccagaaggcttaagcaccagctagaggggtatcatcttctcaactgatgtcagagttcaatgctcgaggtgctgtgtttaggggcatgcaggagagtattatgaaacgtgcaggagagtattatgaaacgtgcctatgactaagtcctgcgaaaccgtagcattttaagaggactcctacccgtggtttagggtagaattcctcagcctcaaccctagtgacgttttgggtaagatacttctttgttgtagaggctgagctgcatattgtaggatatttagaagtatccctggccttgaccactggacgcttgtagcatcctgaattgtgacaacttaaaatgttccccagggagcaaaagtcacatctggttgactaagttaagtatacttttacaaagtctttaataaactggtgccggtcttctgtctcaaaaagttcacgggcaggccagagtaagagcttcacaaatcatttcaattttctcatgttccggctttgttgacaagcacctaaaattgactttaaaaaaccagacctagtattaaggtggatgctgcctcatcgaattagaaaacaattggagttatactaaccccaaaatacacaagatcttgaaaaatctttatcctttgtcttttgacaacaacataaacccaaaatagagcagtgagtggatataggtgttagctggattttcccctgtatgtaaatatttcatagctcagagttatgggatggtgtttatttcaaataacatttgtaaaaatatctctaacccaaaccaaaatgccataagagtcctttttttcctaagtagatgcttaaaacaaattcccgatatttttgttgcatttccaaagtatggcagtaagtatcaaaagttagtgcaaaaatctttaaatatctatttttgttgttgttgttgttttgtctcgttctgttttgtttttttgagacggagtctcgctctgttgcccaggctggagtgcagtggtgcaatctcagctctctgcaagctccacctccagggttcaagtgactctcctgcctcagcctcctgagtagctgggattacaggcgcgtgccaccatgcccagctaatttttgtatttttagtagagatggggtttcaccatgttggccagtctggtctcaaactcctcacctcaagtgatccacatgcctcagcctcccaaagtgttgggattacaggcatgagccaccgtacctggccgtaagtatctatttgtgtttgtgactattatactaagttatgaagtccaagaaagaacttggttattctcctctggcagcttagtgaaggagtaaaagccataaaattcacttaattaggccacggtggattcttttcattgtagagtcactataaaaacagccaacaattattggttcgatgttgttcaatggccttctctctcataaaacatgtgtctaataacggcagctaatgctagtacctatcagtgtggaaaggcatgtttctgactttactatttaatgtgtaattatagaacaggtgctacaatttaagaactgcgctgggggctgagctacaacatgagtcttgccaaggtgctattctcaccaaggtggccactagtgtaaacacagacaaatagaccagcaatgacaatatagctcagggatgccacacccctaggcccacatctgtcctgcttctcacctgctcaaggtgacaggactaaggaatcctaacacacctttgctgccgtggctggacatcacttcagaatccagctcgtcaaaagcctctcagccagggattctcaatctggagcaggcatcagaatcacctggaagttttattaggacactgattgctgggtcttaaccccagagcttctgagtcagtgactctagagtgcagcccccagtcatgctgatgttgctggtccagggaccatactttgaaaaccagtgtctaggcaaccaccactgatcaagccacatctgatataaaagctagctaccatctccgagatggtaccacctatgctaagatgagaatgtacagggaaccactagaacaaaggaagagtccctcactttggtctgggaaagacaaggaatcaggaaatcttccaggaggaggtagcacctcaagtgatccacccatctcggcctcccaaagtgctgggattacaggcgtgagccactgtgcccagccaagcccctttatttcaaaaacacaatgtgttcttccaatggttcatgaaaactagaaacacaaaaaaatgttaaagggtgtttttaaaaattaaggtttgcttgaaagagatactcttatcttttttacgtctagtaaggggtattgaaatacagcagatatggagaacaacatcgacttggaacagaagaatgacccctaacaacttagagcttagacaaatttgagagtttacaaagactgccagacaggatgttatgttagaaatacatttaagcgatattaaaataagtattcaaatacaaaattttgaagacaggaaacttcataatattcatgttaaattctcaggatcctctggaccggaaatcattgtataatgcctaagatatcgtggcaaacaaaattttacaagcaaataaaatgtactttagttctcacaacggtcaccaatctttatatacccttagtcctctgccaagtgcaattaaagccactttatgcttactgatttccttatgacacacacacaagaacctaaaagacaacataaattcgtctgataaaaagtgagcctaaaagctccatctagagcactgcgagaggagctccatctagagcactgcgggaggagctccatctagaacactgcgggaggagctccatctagaacactgcgggaggagctccatctagaacactgcgggaggagctccatctagaacaatgcgggtggagctccatctaggacactgtgggtggagctccatctagaacactgtgggtggggagtgttggctccgctataccatttcctcttgtaattttggcttctttgtcatgagcttctttttcaaagttggcttttagagcccattggttactgatatttactgattttcagtttttaaaaagtctattcctttaaaaatgctctaaagtttgtcaaacctcaggggttagatacctttttgaatgtcagtagtttttctgaaggtttaacatctatcaaaatagagaaaaaacacctttaaaataaataggcctcatttaaaattttatacatcttctaaagggacctatatagtatccattgtgtagacatgacagtactggataaaagtgaatattagtcccagccacttgggaggctgaggcgggaggatcccttgagcccaggagtttgaggctgcagtgagccataatttgacactgcactccagcctgggcaacagagcgagatccatctataaaacaagacaaactgaatacggaatgaacaaaataaaacctattgtctatccctgctactgaaacacatatattttattgtcatctggacctacaaagcttgaaatgatttacaacctgtacattttaaaaattggaagcttatgacaaatgagatcacagagaggcatggaattacaatgagagggtatcctataaaacatcaggtccatcatttgaagcacgaaaaaatcggagcttagaaaattaactggccgtgcatggtggctcccagcactttgggaggccaaggcgggaggatcacatgaggccaggagtttgagatcagcttggccaacatggtgaaaccccatctctactaaaaatacaaacaattagtcgggcgtggtggtgcccatctgtaatcccagctacttgggaggctggggcatgagaatcgcttgaacccaggaggcagaggtcctggtgagccgtgattgtgccactgcactccagcctgggtgacagagtgagactcttatctcaaaaaaaaaaaagaaagaaaggaaaagaaaagaaaattaactgctcatcactgaactgaaagttaggaaaagagtaccctaacccagttcctggcaccacccactcccccaaaccctgcttcccttgtgtttctcatctgtcccatggggataattcctgtcttgccaactcccaaatgaggagattttaaaactataaagtgctttaaaaatgtaaagaattgctattattagctgaggtcagccagcccattcagtgactcaccagagctgacatctcctgggcttgtttcccaaaaccaggctgctgtttattacaaatcatagatattaaagatggaaaaaatatcacaacacagcccttttaggagaataggaaaataaatcctccttccactcccacccccaaataaaacaaaatgcttggcagatccaggagtttctataaggagcttgaatatacaggaagtccacaaattacaaatgattttgtgttccaagagttcatttctgggtgggttaccagatgaaatataggacacagagttatatctgacattaacataaagaacacatcatttttagtgtaagtcagtcccaaacattgcataggacacacttatactaaaaaaaattactcatcatttatctgagattcaaactgaactgtgtcctgtatttttatttgttaaatttggcaaccctatctctgagtcatttggatcgattttccaaccttcggctgtgaggtctcggaaagaaccctcgccttgtgagtctggaaacacgactgcaatttctggttttgtcaattactagttctgagacttcaggcaagttataattcctttgcttgcaaaaagagaccaggaaattaatacaccacgggactaagtgggtcaatataacatgtggaaatacagtacattgagcacaaaagcagcaccactttgttatactaccctacacacatgaaaagagtgatttggtttttaagtcaggccacacaagccaattttaaaagtcggttttccacaagaaattccctggctttagcaagttcctataccatacaaagcgcccctttcccacatctgagaacgttttgagccatgtatggtggtcttgtccactaggcaaccctgtatcagccctccaccctgtcatctttgtccataaagcacggcttgtgactttgcacaaatgcttttttttgctcacatgtacatactttgttgccaaaaaatagtggattattttacataaattagtgcaaactaaaaggctgataccaatgataggaagcactggcttccgaagcgtttccagcatccccaaacagctccttaaacccaatcctatgttgcaattcccaaaactgtgtctccaacctagacttctgaatcaccaatgcttgacccccgaccacacctaggtgtcccagcaactcaaactaaacatgatcaaagctacattcatcttctaaaactactccttggtctcagtgatgccatcacctttagtcgcttatgttagaaatttgagaattgtcaacaattctcttcttttacatcttcaaatccaacccatcaccaagaccaggattccccttgtgaagtgcggctcctaccttccagttctcatccccactcccatcatcgggcccaaacccccatcctctctctctcatggacactgcagcagcctcccagatttcctctccttgcttctggcctcattccctgcccccacccccatcccccaccaacaaccaacccattccccatatcgcagtctctggattatcaaacaaaaccaggaatcaaatcacatcacgccgctgcttaaaaatgttagtgacttcctatcaggttctctgcagtttggtgcctgcctcccttatcccatggtagccccagcatcatgtcacacccagtattctggcctctcacaattcctagagcacagcactaagctctcacccaccccagggcctttgcacatgcggttcccattgactggaccactcttcccctgactggtactttcttatcctctaggtctcaacttaagtataacctccttcaagagaccccactccctgggccattttttaaattatggtaaaatggacaaagcataaaatttaccattttaactacttttattttatttatttttttgagacagagtcttgctctgttgcctaggctgaagtgcagtggtgcgatctccactcactgcaacctttgcctccttggttcaagcaattctcctgcctcagtctcccgagtagctgggattacaggcacgcaccaccacacctggctaatttttgtattttttagtagagatggggtttcaccatgttggccaggctggtgtcgagctcctgaccttaggcaatttgtccatcttggcctcccaaagtgctgggattacaggcatgagccaccgcgtccggccttattgccttctaagtgatattaagtgcatccacatgattctgcaattgctaccaccacccatccctagaaatttttcatcttcccaaactgaaactcagggtccattaaaaactaactctccattccccactggctccagcccctggcaaccactgctcagttttctgtctctgaacttgactattctgggcacttcatataagtggaatcacaaaatatttgtttgtccttttgcatctcatttatttcatttagcataatgtcttcaaagttcatccatgtagcatgtattaaaatttccttccttttttctttttcttttcttttctttttttttttttttttgaggcagagtttcactctgctgtccatggtggagtgcagtggtacaattttggctcactgtaaactccgcctcctgagttcaagcgattcttgtgtcatagcctcccgagtagctaggattacaggtgcccaccactgcacctttttgtatttttagtagagacgggggttcaccatgttggccaggctggtcttgaacttccggcctcaagttatcccccagcctcggcctcccaaaatgctgggattacaggcataagccaccgtgctcagcgaaaatttccttccttcgtaaggctgagaaacatcctaatcatatgggtacaccaattttgtttattcattcattcgtcggtggatgcctgggttactcctaggccattttaaagtaggtcttcattattctcttagaaatatcttatttttctttaaggcctttatcacagattataattctaatatcaagttgtttcatatctcttttgttcaatattttgtttagtctctatctctcatcacactctcaacaaccccataagctccctgaggggaagggcatgtctgctttgctcctcactgtgtttactgccagcacctggcaacgtagtgggtatttaataagtaattgttgaatcactgaatgaaagaaaatcactaggccacctgaaggccccttgtctttagagtcactgtggaccatgtaatcaattgtgaaggtgagccaatgcatacttacatccacacacacatatttgtagctctctgggcacaaaacattccttttataacatgtcagtctatttgcaactagcacacatttccatggcctgtgctttttttgaaggatgtattacgtgcaccagtagctagtgtgtttggcaatataaagaaattaagtattgacaaataatacaataaggatgaaattttattaattttttttttttacaattaaaaagaattgagacagggtcttgccacgttgcccaggctgttctcgaactcctgagctcaagtaatctgcccacctcagcctcccaaagcgctgggattacaggtgtgagccaccacacccgaccgtaatatacatgaaaaacatcatgctaagtgtaaaaagatgatcacaaaagaccacatatcatacgattccatttacataaaatgcccggaatcggcaaacccacagaagcagagggtagatgagaggctgccaggggctgcggggacaaggcgataaaccaggcagagctaaaaggtacaggatttctgttaggggtgatgaaaaggttctgacgtagattgtggcaacagttgcacagctatgtaaatatactaagaaccattgaattgtatattttaaaaggctgaactgtatggtacatgacttagatctcaatatagttgtttaaaacaaaaaaatccatgtgtatggagatggggagtggctggaaaaagcttaacctcccaattaggcaaaagacaaacaggatagggagggggactaggggcttgtgagtggcaatagctgcagcagcagccctggcaggacagcctgtgggttacagaccgccctcctgtcaatgaagtcaagtcctctgcttcctgaaaaccgcctcttttttctaacaatgttctttcccccaaactaggaagacaggctgatggtaaacacaaagttctctgaaccaaagccttatatgtatgtttctgaggaggctctttataacctagttgcaagcaatctgaacacagcccagcgaatttccagcttttgaaactcagatttccttttgcgacccaggttctgctgagaaagttatctttggctcctctctctctcacaccccacatcccatctgttcggaagtcctgttggcatttcgatctatcaaaataaaagttgcacgtatgcctgtgtccgatcccattctctctgtgtcctttctcctctgtctttctcaagaatctgacatctcagccccacagctaccatcctggcggacactaccaccctgggaaaagcttccaccctcacttgcctggctttgcctcctgcttgaactcccggattgggagccttctgcctggactggtcttcacacagatcacaccactccaaggagcaatgtcctgcactgagccatcttccaagaaatcaaagccaaagtctttacatagcctggcaagccctgcaagacctggctccccttcctctctgcccttacctccttcttctccttccctcccccacttactctttggaggaacagctagataagccaagcactcttaccctagggcttctgcagcaagttatctgtcccctctgcctgggacactctttccccaaaacttcctgtgccaccctctctcctcctgagtgtttgctcaaatatgaccttctcaaggaggttccactggccactctatttacaatggcagcttgcacccttgccctcccattctctcggtcccagtgacctcaaagattcagggcatgttagctgctacttacatcaccattcacagcctaaggttctcaaattgacttttaagaattttcatgttgttctacagaaggagagaaagcctaagactgataacaaaagtctaaatgctcttaatgcagctgaactagacaaataaagtatcagatcgccaagagattaaccatgttaaccccagtattctttttgtggctgtggttggcattaaataggaaagtgggtggacacgtagggatagtagtatttttggttggcttcaagctttgatgagtttttgtgtgttttgttttgttttactttaaaaacctgctttttaaacacgtaaatccttatttggctaattttcagggcacagtgtgagtataaactcatatgagagtctattgttctctagaaactacagattaaggtgtctttaacagactgatgtctaattattacataaaggcatctgatttttataccaggacacctataagcacattattatagaggtggaacatttgataactctgccatgctacagtctgtaactgaccttttgccttgccatggattctaccctaaggggaaaaacaacctgacattaaaaaaaaaaaaaaaaaaaaaagtcaattctatggaatgtcatctctggaaggtggctgtggttagcagagatggccagatagtagggccacaaccctggggcttttacacccaccctgacacagaggaaagagtcacccatagcacagaccagttggatgatagaatggcatatgacggtcatggtggtgcgtgcctgtaatcccagctacttgggaggctgaggcaggagaatcacttgaacctgggaggcggaggttgaggttgcagtgagctgagattgcaccattgcactccagcctgggcgacagagcgaaactccgcctcaaaaagaaagaaagaaagaaagaaagaaagaaagaatggcatatgactgccagctcagtgagagcagctgcaggtgaaaaggagaggcacgtgctgccttcaggtgtcttcaacaacaccctcctcccacattccctgcattcttatttccatgctactctggaggaaagcatggtaataaatactataatacgtggccctgcccatcttatttatgaaggatacattttaccaaactgaataaggggggctcaaaaactgacatgaacaaacagatatgtgtatgcccaggtccatggcagcattagtcacaatagccagaggtgggccaggcatggtgactcacacctgtcatctcaacactaggaggccaaggcaggaggctagcttgagccctggagttcagcctgggcgacatatcgagacacacagacacacacacacacattttttttttcttttattagctgggtgtggtggtgagtgtctgtagtcccagacatttgggaggctgaagcgggaggatggcttgagcccaggagttcaaagctgcagtaagctatgatcacaccactgcactccagcctgggcaacagagtgagaccttgtcttaaaaaaaatttttttaattgaaaaaattacagtagccagaggtgaaaactacccaaatatctatcacagatgaatgggtaaacaaaatgtggtatgtgcatacaatggaatattattcagccctaaaaaaggaaggaaattctgacttgtgctacaacatagatgaaccttaaggacattacactagtgaaataagctagtcataaaagggcaaatattgcatgattccacttaacctgaggtactgtagaatagtcaaattcatggagaaagcagaatagaggttacagggaccaggaaataggaagaagggggtagttactctttcatgggcatagtttctatttgagatgataaaaagttctgaaggtggatggtggtgatggttgcacaacaatgtgaatgtacctaatgccactgaactgtgcactgaaaaaggatcaagatggtcaatgttatgtatattttacatttaaaaaaaaaaagtcaggcgcagtggctcacacctgtaatcccaacactttgggaggctaaggtgggcagatcacttgaggtcaggagttcaagatcagcctggccaacatggtgaaaccctgtctctactaaaaatacaaaaattagccaagcctggtggccatgcctgtaatcccagctactcaggaggctgaggcaggagaatcacttgaacccaggaggcagaggttgcagagagctgagatcgcaccactgcattccagcctgcatgacagagcgagaccccatctcaaaaaataaaaaaatttaaaaactcccatgaaataaacttctacaccaagaagacaagatcataaggaacctctcctcctctcaaagttgtactggtacaaatcagagcacagattttcttttaattcttacaatctttgtagcctgatgaacttcacacacttggagtccttactgtaacaaaagttctggaggttgctgggtgcagtggcacatgcctgtattcccaactactcgggagactaaggcgagaatcacttgagcttaggagttcgagaccagcctgggtaatatcttgagaccctgcctctaaatgaaaaaaacaaaaacaacaacaaaaaactggaggttgatacagcagctactagtgcctgacttagaggactcacactttaatttttcaatataaagataggggcattatttcccagcatgaaatgtacaaaacctacccatctccccaagtgagtaaatatttaaaccacccaagccaaagggttacctatgctgttgtttgtttgtttgtttgtttgtttttgagacagagtctcgctctgtcaccaggctagagtgcagtggtgcaatctcagctcactgcaacctccgcctcccggattcaagcgattctcctgcctcagcctctggagtagctgagactacaggcgtgtgccaccagggtttcaccatgttggccaggatggtctcgatctcttgacctcatgatctgcctgccttgtcttcccaaagtgctgggattacaggtgttagctatgttcttatagaaaatgttaagtgttccttctggatctacagatcatgcacagaaatctcagaggatcatgtcagtaactcactaagttccaggaagagaaaataaggatgtgtacatgaatcacaccacactctataaaataaatagtgcatccaatccatggaagcttccctgaacagcaagaatatacattctgatactaagtgaaggacagtatttggtgcctgagggtttccaaagaggattttctagtgcaactcaatttcaataaaggttagaaaactgttttcaaaagccacctgcactaaatcaaacaaaccgcaactccagtagaacaaaagccactcagcaacaaagtaacaaagccataaatgacagccctgtcaataaagaccaagctactagccaaaggtcaggctccacagtactcattgcagaagtgccaggcttctcaatcacgctgtgggggatggtggccttcgccactgaaaggctgcccaggaacagaggtgaccctcccctccaggagtcaatgtcagactgagagctggtttcccactccatccccaccacagcttccaggcccatttgtcacctattaaatgcaaatatactagattgaaagactgataaagaacacagatcttcagagtggaagtggcctgggctatcccccaggacctaaagaaaccatccctccatgcaaagagggacaaggtcccaagcaggaagagagcagacacctgatctgctttctttctttcttttttttttttttttttttttgagatggagtctcactctgtcgcccaggctggagtacaatggcaaggtctcagctcactacaacctcacctcccaggctcaagcaattctcctgcctcagcctcctgagtagctgggactacgggcgcatgccaccacacctggctaatttttgtatttttaataaagatgaggtttcactatgtgggcaggctggtcttgaactcctgatctcgtgatccacccgccttggtttcccaaagtgttgggattacaggcatgagccaccacgccaggcctctgatctgctttctcaccaaagaagaaacccaactcaggccctctgtgaaccccacagacttccatgaagcagagaggtaattcccccagcatagtctaaagatgaatgaatgaaaggagctataccaaggttctctgtcattagcaacgcctacccaggatccacaactaagaaaaccacacagggagcaatgagcctttcaagaagccacagggttcagaaactgttgagttttaaacaggtagtaattaaaaaacaaaacaaacaaacaaaaaaaccaggagtgtgggtcagaaatggtggttcacacctataatcccagcatattgggaggcccaggcaggagaactgcttgagcctaagcgttcaggagaagcctgggcaacatagtgagaccctgtctctacaaaaaaaaaaatagaaaaaagaaaaaaagaaaaaaaatagctgggtactatggcacacctgtggtcccagccacttgagagcctgaggtgggagaatcacctgagcccaagaggtcaaggttgcagcaagccatgttcatgcctctcccctccagcctgggtgacagagcaagaccctgtctaaaataaataaataaataaagttaaaaatagaaaaacaggagcgtggaggatgagggagagaaaagaccaactgatgtgatgggtaaagggggctcaggagcattccacgggcttctactgtgcaggaagaggtagcaggtgagacagcaaccaggccccctcacgagttctcctgcaaggttaagaggcaaatgagcactctggtcctctgagccaccagggcttaagaacaacagtgtagatcggagacttagaaccttgcccctgctctggggaactctatctttccagtgcctggtgcaaatgggcactgatgtttgctaaataaatactaacttgtagaatgattcctgtttcctacatagcccaggagaaaggcaatggctgggtgagtgatatttacaaagtcatagcaacaacacaacaatgtattaacgactaccttttactgaactgtgtgctaagtcctctacctaagctatctcatttggaactcatcacacagccttgtgaggccatactattattatcccatttacagatgaggaaactgaagcctagagaggcaaggtaacttgccctaggttatgcacctaggaagctatgaggcctgcgttccaacccaggtcaaaagactccaaggctggcaacctctgtttcactgctgcctctggactgcttgcagggaccagttatgaaacatatttctcattgtggaagggttgggcaacaatttatttaaaagtgcagtgcatttataagtatcaaagaaagtaccaatatggccttaaagattcagatgataaaaagttatctgttttttaagaaaatgaggccgggtgcggtggctcacgcctataatcccagcactttgggaggccactttggtggattgcttgaggccaggagtttgagactagcctggccaacatggtgaaacccgtctctactaaaaatacaaaaattagctgagcatggtggcacacgcctgtgatctcagttactcgggaggctgagacacgagaattgcttgaaccagcgaagaggaggttgcagtgagattacaccacttgcactccagtctgggcgacagagcaagactctgtctcaaaaaaaaaaaaaaaaagaaaatgagaaacaagactaatatatacatatacacacgtatatagacatgctcatatctatatacatacatgcacatatatatgctttcagaatcttcctaaacaataccaggtcttcagtgatagaggacctcaaaagatcttagattaggtattacttttagctgggcatgggaatggggattcaggagtaacttggttaacaaaatgaaaaatataacctgtcttctttttatggtattaacactcttctggcagcaaattaattttttacttaataagaaacaaaaaacctacaggcatgaatacaattaatctaactgaatgtcaacagacctgaaaactcacaagatacctaaagacaccactaagaaaaactttccaggagactaaactagaaccaagtgtacaaataaactctaaaattaagtgcttaagcaatttaaaaggcatctctttttagagagatttgggacataaattgttctggggccaggcacagtggctcacacctgtaatcccagcactttgggaggccaaggcaggaggattgcttgaggccaggagttttagatcagcctgggcaacataacaaggccctgtctctatgtattttatttataaaaaattttaaaaaacaacttgttctggtacctaaaaagcaagttcctctgcattcatgagtgcatcggtttctttttcagtaaccgacactaaagagcaaaggtaactaggaaaaatctctctggagttgttagaattacctgcattctgtgaatgttgcttataaaaaactaaaatggaattttaattcataaggcaataaaatcttaaaaatataccagatacctgcaataatagtatttttagatatcaatctaataaagaaagtaagaaaccaacattcaaacactgactatatataaagaacattcatatgttctctgatttaattctttcaacaatccaaagagattgataatatcttttcccctcaacagagcagcaaacagaggttcagaaaacaagaattcatttaaggttatacaattaataaggaaaagaactgaaatctgtgggcatttttatattttccactactccttgcttcaaaaggatggaaaagaaagaggaaagaggaatggacggaaggaaaggaaaagaacattctacagccagatctggtagtgactccattagcactaagatcccctagactgaaaatcagattaaacataaaatcagtcctgaacttgccttaccaccgaagacttctttttgcgaagccatttgctgtaccacattattatttttaaacttctattgaacaaaaaacaaaacaaaacctctcccagttctatcactaggatgtaataacatgtgcacacaggtgtgtgtgttccttaaaatccataaggaaaacttgaaagcagccagagctgacctcacacaggtggcatctgtgttggacagtaataaccaaaagagtcttgctcggcccttaataacccacgcaaagaatcactaaaagttactaaaatacagccactggaaaacgacgaatgaacaaagtggttaatgttccttcccaaaattatagcaaggaaaactccaccacctaatgaaaatcattaagagaattcagaggagttaactgcaggcaggcgtgacttctcccccagaaagtaatcagctaataagcattaatcatcttgtgcacagtctgcgcatttataatagggtttaataaagccttcaacaacaggcccagaattaatgaacggcatcttaggtctaacacaaaagtattccttagcggacgaaaattagcgcttctacttcacatttgctgtcgtgtcccccatatatacgggctcgtattcactatccctggaggctttatcacgcgtggttttttttagcttttgttcctgaaagcagttaaccttcatcgataacctaccgtgtgccgggtgatctccaaacatcccactagttttttctttttttagtttcccatgggtagtggcaaaattttgaaggcaatgcaaccaggaagatgggagcgaatattttctcacgccaacagggaggccagtttccgggagaggaactcggcggcgtctggagctacccaggaagagcttgcagcccccaagggcagcgcgtgcaggccaagggggtcgggtagggttgagcgggtactcaccgggcagaagcgcggcccaagtcctccttacttctgcgtgtcaatcccccttccccaatttgcatccttactgcaatccagtctcccccgtacaaccgtcacggatctgcgctccgagcaccgcccccccccgcaaccagccaccaacccccggcagggaccacaggcacacgcctccgtcggaaaagttgggcagacacttcagaacttttctttcactttggggagaaggagggagttggagaagtgggggcgaggggtgttaaagcactgggccattctctgcaacatctccccgcgccccccaacaagttgcccctcctcgtgcacacagcgaggtgacagcgcagggcaccaaactgctgagggaaggagatgcctgcagccatctcagcggggctggcggacgcgacccgacagtcaccggaaaaacagtggtgtcggtcttccccatcacctcccctccccatcccacaataaagcgcacggaagatgtctgggagtacctggccctgccacaggagctggggaggagagcgatctcaccccctccatccctcccggcaggtgggccgcggtcagatacgtttggcccgcaagtccttttcggacacgttggcatctgctcccaaagagcgccccagcaggacccggtcaccggggtcttccagaggggcggtagccaccgcacaggagccagcggcatcccccaaggagccgcaagccctacctggcttaacccccggacatgtgtgtcgctaccgatcgaagaacccaaacaccccgagatttccctcctctaggcaggtgaaaaccccacggaactctccgcagcgctgcctgcccagccggccgtgtctcgccgtccccgaggcctcgggggctcccagcacctccacccaaatcccacctgtgcgggctcgggagtccgagggcgctgacagctgctgccgccgcatcccggatctccaaagtgcggcgggagcggccagggaacctgcaggacaccgccgggccaaggggcttgggaaggtctgggggcccccggcgccgcacccctgcttacctggcgttcgctgggccccggctggggcatccgcctggtgcgcgccgctcggagcgctcgctgcgcacctggccgctgccgccgcccgcccggccccagccctggccgccgcgctagcgctgcatggcgcacgggggctggccgggggcccggggaagcgtgtctagttggcggcggcacctccggctctcgcggctcgctagtggctcccccgcctttccccgccccgcgtccgtgcacccttcctctgcagccgcccttttgcctccgctccgccggaccggccaaactggtttctccgctcggggaggtgcctctggtttccctccagcagccgcggccgccgagcctcgctggggctggggctggggctggaggcgggctcggccttctcccctccctttttccctccctagggcggagaggggctggactgcaagccccggggcggcccgaggcggcccaggtccagctcctgccccacgccctccgtgcgtcctggagtcaggtgggcacccctttcagtcttccgagcccagcctacgagcccttgcctcgcccagcctgagacccagttgctgcggctgctcttagctccccgggggccgcactcgccaccacacctctccagcccagcgtcactttcccgctgcccttggctggcttggccgtcaccccgggtcgaggactgagccagcctggaaagctggcggggccgcggcgcgcccgggacctgagctccctcggtaaggggagctgtgtcctcttgatgccaagtcatgtttggggaccggtcaccgaatgcgcgtcaaagttcgccgcgtggagggtgaagaaagaggctgcgcctcaagacttccagaaacgtatcctgtgattgcagccagcaggctttctgccgagtccaaacgctatcgagtttttttgggtttggagtcaaaaggagttaaggtgcggcccgtgaaccacgcggtgtaggtggaaattttggactcagcgcctcgttgctggctggtgtctgagcgggtgaatcgtgcctccctggcagtatagacattaccctccttcttgagtagacttttgccgctccccgactatggaccgagtcgttgggataagaatggaggaaaatcaaagatcagagtttgcttaaaatgcagtaggggagccaggactcccacacgattcccagtcacctagaggctcacatctatgcccaagagtccagactcccaactgggtcatcacagaggcttcctacaggaggccgtgcttgatgggactcaaagatccacagctttaaggatcagagttgtgtagagagggtattcaacgggtggccaactggtagaatcttgtctgataccaaccccgaggctgctctaggcttctttttcatgagtcaaacttgatctctgactaggtgctggtcagtcactcaatctatccaggcctcagtttcctcatttgtaaaatgagattggaccagatggtctcttccagcacttatattctgaagctaacgacagaacaaaggtaccgatgcaagagaacatagggcctgttggtgacactggttgatctaagacatttagacttgtttttggtagcacctgcaaaccgttgacaatttaggaccgagcatgagcatgatcaaggttgtgttttagggaaaataatagggagatagtctagagaggataaaactgaagatgggagaatcacttgagaggctgggacagcgacatacggaggagttgccaggggaagtaaaaaggaggaaattcaagggacaccacagaagagagatagggcacgaagtggccacaacctgcaactgactgggagaggggagcaatggaaggtgagccaggttctcaagactgggttatggcatgcaaggagcagcagactccaaaggagggaagccgtttaggaagactctgcccctatctggataaatgccagcaaacctaggaatcaagaggggattccagactaaagggggcaccccctccttgcagatccactaccaagtgctcaacctgtccaagaaaatgttacatagaagagactaaacaaggacgcatccaatctacacctgtacctagatctgatcaataccattctgatgtctgcatttatttacttgtttatttatttatagagacagggttgggtttcactatgttgcccaggcttgtcttgaactccccagttcaagcggtccacctgcctcagccccccaaggtgctgggattacagtcatgagccaccacctgtactaaaaatacaaaaattagccaagcatggtggcgggcgcctgtggtcccagctactcaagaggctgaagcaggagaatcaattgaacctgggagactgaggtggcaggcagtgagccgagactgtgccactgcgcttcagcctgggcaacagagcgaggctctgtctcaaaataaaataatattctttcattcaacaaagatttgagtgtgagtgcctactgtgtgtcaggcagttttctagttgcttgggtacatctatgagccaatcaaatatctttttttttttttttttttagacagaggctcgctctgttgcacaggctggagtgcagtggtgtgatctcggctcactgcaacctccacctcctgggttccagcaattctcctgccgcagcctcccgagtagctggggttacaggcacagccaccaggccaggctaatttttgtatttttagtagagacaggtttcaccatgttggtcaggctggtcgtgaactcgtgacctcatgatccacccacctcagcctcccaaagtgctgggattataggcgtgagccactgcactcggcaagtatcttaaaaggtggcaaatgctttgaaaaaatagaacaggctggactgggagaaggcccctgaaggagctgccttttggagtgctgtaaaagttatatttcttgatctgaatgataattatacgagtagacgcatatgcaagaattcattgacctgtatgcttaagatttatacattaaaaaataatagaccaggcacgatggctcacacctgtaatcccagcactttgggagatcaaggcaggtggatcatgaggtcaggagttcaagatcagcatggccaagatggtgaaaccctgtctctactaaaaatacaaaaaattagccaggcgtgatggtgggcatctgtaatcccagctactgaggaggctgaggcagataattgcttgaaccctgaaggcagaggttgcagtgagctgagattgccccactgcactccagcctgggcaacagagcgaataataatactactactaataataattgagcaggattaagagattaggatttggaggatgagtcacaattttaaataatgtggtcagggtaggcttcttgaaaagctgcatttgaaaaatgacttgcaagaaggtagagtttcatctttgatgagacaaatcctttgaaaacccattttgcatggaacccaccagatggaggcatgttaaaaccttatcctaggcgcagtgcctcacgcctataatcccagcactttgcgaggctgaggccagtggattgctcgagcctaggagttcgagaccagcctgggaaacatggtgaaatcccatctctacaaaaaatacaaaataaaattagctgggtgtggtggcccgcacctgtagtcccagctactcaggaggctggggtgggaggatcctttgagcccaggaagtgaaggctgcagtgagctgtgattgcaccactgcactcaagcctgggtgacagggcaagacactgtctccaaaaaaaaaattaaaaaaaaaaacaaaaccaaaacaaaacacccacacccacacaactccacaaccttatcctagaacacttcccctatgtaagtcttcctcatcttaggaaggaggttctcagagtgcatcagctggtgttgctgatgaaggaattagctcacctggaaaccgaccttgtcctttctgaaagaaccatgccaaattttggggtgccttgtcagggcaatcactggaagtgtctcacatgcaacaattttaaaatgcatcttacatgagtcactgagagatgacttctttgtcctggcagagccctgattccaccagccttggcagccctttctcagcattctcagatgggattgaataaacactctggttttatttagaagtcactctcatttagtaaccaacgagctgctgggggaaatcacgaaatgtaacagaaatggccatttctttttatgttttattttttattatttttttgagacagggtctcactctggcacccaggccagagtgcagtggtgaccattgctcactgcagccattgtgcccagaaatagccatttctaaaagagggtaacaatgattttcaacttttgtagttcataatttcctctgtttcttttttccccccttttcttggcagcagtcttatgtacatttgcatgatgtgggtaggaaagccagggaggttgccaagagagctagctcagttttactgaaaatttatttcctggaatttttttttttacaagataagataagtgataaaagatatgtttaaatggaggtgatactgcttgtattcagttctttgctaagcccagtggtcgtttaagctaaagcatttaatgccaatggaaagactcatgctgcactaggtgctattgtaacccatgcttggcagtcaagattaactcagttgaaagttcttcacagtcattatccagaccagatccagaattttaaatctgataagacacctcttatgtgaatctgtcctagcaataagtgacattagaattttcaaatatctgccccacatccttcgaaatggcttttaaaacaacaaatacagatgatatattctattttctctggcacaatgagttttccaacattccttctaagttacaaggctttccacttcctttactacttaatgacttctttttttctgactaacattttaaaataagaaattagattgcaaaagaaatattaaacatcaagtaactaaatgtgtctcaatgattttggcaatcacacagacttaacatgcataaaatgttacaggaggaattattcatgttattaaaattcacttccctttcttttgtattcataagcatgcaaatgtgtaggattgtctaccattcttttctacaaggaagagattttaataaaccacttactgtatttctctatggaaatgtaataaacattacctgatgttgataatgtaacaccagttaaacttaatgagtaaaattaatacagacagttcatgaataattttccaaaataacttgcgattgttgttagtatatgtcgccatgtgttcctgtagttgtaggaagtttgtatgtattatcttaggctctgttctcatcattttccattgtgtcatgaaaacacatttaccttttggactttatccctcttccttcctgacctgcaccctaaatgtggctaattccaggttgctgtgaatagaagtttactagattttttttttttttttgagacagtctcactctgtcgacaggctggagtgcagtggcgcgatctcagcttgctgcaatctccacctcccaggctcaagtgattctcctgcctcagcctcccaagtagctgggattacaggcacgcacaactacgcccagctagtttttgtatttttttgtagagatggggtttcaccatgttggccaggctggtctcgaactcctgacctgaagtggtctgccctcctcagcctcccaaagtgttgagattacaggcatgagccactgctcctggctgaaatttactagattctgaagagcacgtgctactcctcctgtttgaaatgccctacctcatgtgcctgatctcatcatccttcacatctcagttcccaagtggcttcctctgggaaagctttgccctagtctccctcaaactaactaaagcttctaacatttagttggttcttgctgtttccacagcattttgcagctgacttctagggaaagcttcccattgtattttcactgtttacctgtcttgttcctcactgcactgtgagcccattgagacataaaactgagtcttattcttcttgatctcttttggcatacagcattaaatagagcattccaggtgcttattaattcttatagaatgaatgaatggttggcatggtcataattctcaatagttgcatagtattttctcctgctgatgatttctttaatcacttgctattcttggatgtttatgcatttaccaaattggtttccagaaatatctcatttatcacaacccaccactatgttaagggcttctgaaggtcatatttctatctggttcctgttattttgcaggctgtaatctgtccctctgtatttcattctagaaacagtgtgcctcagtatacaaaaaatttttgtcttgttagaactaggatatgagtaagcctttgttgctatcactggatgataaaaagaaggttattcaaattcttccataaaatcacaggagtgtaccttgtgtatgaacacagccttctgtgttttcctaaatttccagtgagcgtgagtggttgtccctcccagttaaagaaaagcaaattaaatgcaaaataaaacaatgagaaacaattttgtacttatcacattagcaaagttttttttttttaagtctggtgttgcaaacactggcaacatttaggaggaaacaggcactcatacactgtaggtaggggtacaaattgtgcaacttctttgaaaggaaattcagaactatatcaaaattttaagatacatgccatgtgccccaagaatttatgtctaggaatttatcttagagatacacttgaacattttatacaagggtaaatgtacacatatattcatggctgcatgccttttctgcaaaagaccaaaagtgacctcagtgtccattcacagaggttacttccatacaataaaatactaatctgccatttttaaaaaaattaaggaattctagtttatttctgtatacataaataaaattcatgtgtataatgtttataggtttccatttgtgtaacatataatataatgtaataaataatataatgtataatctaaattataatgtatattatgtatacaatataatgtatacataatctaaattataatgtatattatgtatacaatataatgtatattgtatgcatataatataatgtatatgtatataatgtaatatgtaactgttatatattctcatatgtgtaatatatgctaatatatgtcatatattacacatacatatatgtatatatagactgaaaatatacacaagaagttggtaatggtgctcatctctatgatgggagactaattttcacatatatgtttgtatagttgaaactattttattgtatttttccctgcttttcttgactgtagaaactttgtttttttaacatatttctggatgattttttaatttaatttttttggcaaaaaatacgcatacaaacacacatatatatattttaaactcaaatagtactgcaaagtttctaagggaagacaacagtcttgtcattcccctcttttctcaggctcaaatgctactctccagaagcactcattttaaattttagttgttcttacattcactttcttttgttttctttttttttgagacggagtctcgctcttttgtccaggctggagtgcagtggcgtgatcttggctcactgcaagctccacctcccaggttcaagcgattctcctgcctcagcctctggagtagcttggactacaggagcccgtcaccgcgcctggctaatttttgtatttttagtagagacgggttttcaccatcttagtcaggctggtctcaaactcctgacctgtgatccacctgccttggcctcccaaagtgctgggaatacaggcgtgggccaccgcgccgcggcacatttcattttctttcccggcctcccccagatggagtctcgctgtgttacccaagcaggagtgtacagtggcgtgatctcagtccactgcaacttccgtccaccaggttcaagcaattctcctgcctcagcctcctgagcagctgggattacaggcgaccaccaccatgcccagctaatttttatattttttagtagaggcggtgtttcaccatgttggccaggctcattcactttcatattactaataacaagcttgtttggccatgtcttgatgttttccccttttagacattatctactgaattcctatcagagaggcagatttaactggcttacacatcccactcctgacaccctcccatacaaactcttgctcttactccaatctcaaatcataattagattgcaacttatagccaaatcaattttcagtggacaccttattatgactatggaaatactgtttgcagttaagccatgcagtatagtaacattgcacttcctttctcataaagttttttggatttgtgttgagttaataattgcctttccccctcatttactttgtcttccatgtgcctatcattaattcagttccaaaatgtctcacataaccataaagcacctctcagtatggccagacacaaaattcaactgtttgcatttttttcccatgagacattcccggctgtggactctgtcctcttgctttacgatgaaatgatcactgtcatcatcctgagaattccttttttgttgtacttgctagttctggtggagcacatctgaaaaagagaacactagagaaaacttttttgaggcctaaggtatcacctaggatgccttcaattataaataatagcattctggaatacaaataggatttttattactattattaggtcatctctaactctctgaatagttagcagctcaatgatgtcatcaggacccaggcactttttgtacccttgctgtgccttcatcacaacaatgatgatgtgtccgctttatgtcacaggtggctacagcagctggctaatttcatttgtcagaaactgagtcataccttagctgcacggaagtctcagaaaatgaatatatatcatttacatcttctattgtgagaacaggtctcaagtcaataggaaagaagggattgggggaatagctgttggataggcaacccacagggtctgcacatcatgtgtatttaaaaatgtgtttagtctgcattcatagtttagctgggtatagcattctaggttggaatgcattttttttccttagaattttgaaggccttgtttcaatatatcctagattccagtgttgctgtcagatgcttgatattattctgattctcaatcctttgtatgtaaccagctttccactttctggaagcttttcctctgattctaaaatatcactgtagtgtgccttagtgtaggcatgcattcctttttctttttctctttttttttttttaagatggagtttcacccttgtcacccaggctggagtgcagtggcacaatctcagcttactgcaacctctgcctcccaggttcaagtggttctcctgcctcagcctcccgagtagctgggactacatgcacacaccaccatgcccggctattttttgcatttttagtagagatggggtttcaccatattggccaagctggtcttgaactcctgacctcaggtgatctgctcgccttggcctcccaaagtgatgggattataggcgtgagccaccgtgcccggcctactttctcaatcaaaaagtaatgcagttttttaggatgcatttttttaaaaacagcaacaaaaatatttgaatttggattatctttctcagttacacttacttttatccaactgcaattgacctggggtaagcttggcaacaatgaaacatcttttccaggctattccctttggagtctttcttgttctctggatccctagacttctcttcccaccacttgatgccttgcccaacctatcctcttcacattttctttacaattaaaactgacctaaaaccattgcttaccttttagagctaacgtagctaatctaataaattaattcacaaaatacaatgatgaaccctccttacacaaaacatataggcatttaatcacaatcttcaatatttttatcccaaatgaaagagtaaaaggtgggaatttcacagcggttgatgatgattaactgatccatattttctgtccttcaaatcatattccctaatccagttcctaacagttctgaaacaatgcagaagaaaatcttggctttttaaggaatgcttcattggatagcaatttaaaaatgcacttgtattcaaatctaaacaatccatgacatctgtggggcacctgatcaagaattgctcacattccatcttgtgagtcaaagcacaggattgctgtgcttctctgagtcccagcactgaagacctacacaggcatctttcctatgactcacctaaaatacttaatttctcaaagatgtagacaatcaaatgctggcaggtgattctgtaggctaaactgtctggtcctcagctgtgctgagtgacagtgatatgcataatggtagtttttaaacttttttatactgaactttcagttgttgttttctttaactctaacacctcaaaacaggagagtcatgtgtaaaacaggagggactggggcagctgacatgattggcacaatggatggcccctgtgtcaggtttaccataaagctaatgatacttaaacttcagggactctccaaagtcttatgcctcattttacattattaatttggtaaaaaaaaattttttttgagacagaatctcactctgttgcccagggtggagtgcggtagtgtgatcttggctcactgcaacctccacctcctgggttgtagtgattctcctgcctcagtctcccaagtatcttggactacaggcacaagccaccatgcctggctaatttattttagtagagacagggtttcaccatgttggccaggctggtctcaaactccggacctcaggtgatccatccaccttggcctcccaaagtgctgggattacaggcatgagccaccacgcctggtcaaattttgtaattttttttttcttaaagaactctcctcttcctcagttgtataaacttcaggccccatgaaacctggtttcacacctgataggacccagagcttcacccctccttcctctcctcttcagccctctccaaggagccctagtcctctgtggaacaaaaataaaagacaacctgtgactgggcacagtggctcatgcctacagtcccagcacttttggaggctcaggcaggaggatcacttgaggtcaggagttcaagagcagcctgggcaacatagtgataccctgtctgtacaaaaaaaatttaattgggcatggtggcatgtgcctgtagtagtcccagctatttgggaggttgaagcaggaggattgcttgagcctaaaaggtcaagtctgcaatgggctttgatggtgccactagcctgggcaacagagtaagacactgtcaaaaggaaagggaaggagaggggaggggaggggagaggaaaggaagggagggaagggggaaaggaaagaaaggagaaagaaagaaaacaacaacttgtaacaattcctggactaggaatcaggagagagggtctgacacctgtgcttgctactagccctttgtggtcctcagtcaggtcacttggcctttttcagactccgtttcatcatctgtaaaatgggtgtgtttgacctgatgatcgccaagctccctttgaaaactaagtctttgattctaagtctactggggacactttctacattcccttacaatagcctctattcatgggtttgtctttccccactgaggtgctggaaaaactcaccctctgattttctgggtcctgccaagacttagcccagcccctccctcttcaagcaatgacgtccgtgatggtgataggactgctgtctctcctctccccacaattcactgtctccactcctgctagatgaaagaggaatgacagggtgcagttctatgtgttaacccttctcagaataccttcatttaaaatagaaattaatatttcatctcaatggcataactctttagtggtgaaattttaggcagcagttgcagtcaagtctgaggaagagagatcgtcttgagctcttgcagcaggcagtgtttagaccccctcaagccacaaggggacactgcccattattctagaaccaaaagactgacccagttaaaaggcacaggagccctgtcaacgtgggtgcaaggagactttcacttggaatatcatttacactcacacagcagtggaagttaattgcatggtggaggatggggacttcacctgcttcaccatccatactccactttcccccagtcacagatcctgatattatttgggggcagcagcatgcccagctaaaggaccatgtgtcccagtctcccttcagcgtcatgtggtcatgtgataaggttctgacccatgaggtgtaggcagaatgttacatgagacttccaaaaactccctgaaagtccagaaacacacccttttctttagtcttcaagtcagagatgtgatgatgatggctgctaagtggttgccatcttggatctgaggggactttgcagatggaagtcatttactgaggagggtggaccagaaacataaaaagagcgtggctccctgatgacatcgtggtgccacttcctcagcccagaccacccccactctggacttatttttagtaagaaaataaaatctttatgtgtttaagccactagctctcagttcactgtcactcatagctgaatatattcctggctgaaataaatgagaagactaaactttccaccttttaaagaaagaatatagtgagtaaaaaacagggtaagatctaggagagatgcaaataaccttaaaactcaaccttcctcagcagaaggatataatatatatataatatatataacataaaacataacatatatgttacacatataacatatatgttacacatataacatatatgttacatatatcatatatttatatatataacaaggatacattcatttaaagcccgaatctcaaaagttcagacaatgtattgaaagggaaaataaaacaaaagcactttagtatgagcattggcgattcctgttggtcccccacagggtagaagatgagaggttggtcagtcaggaagtgtcacctctgtgcacaacctggagttgttttggaaggaggagagacgcccagagcttgagcaatgcaagcgtgatccctgctctagggaagcgtgaggtcatctgcacatgctcattcatgctcgctttgctccccgcagtagggactcctagcacctccctcagacccatctttgttttggctgctgtggccataagatctgcacaagcctctgtcacagtgctgaggatagaactggtgagcaagccccagtgctggccctggaggagatgagagctcagtgagccgagagcaaggaaacaagccatcaatccctggtaggacaagtgttcacaagggggaaggcccgtgagaagactgaggaggggccctgactcatttttggaagtcccaggaggcttcttggagaaggtgaccttctccaagaatagagacctggaggatgagcaggagtttctgtcctccccttagtcactgttcagtggcagctgctgtcacatgacagttctttgccccagatccatagagtgaagtaggtagcaatgaggtagttagaagaatacactgctgggctgggcatgttggtgcacgcctataatctcagcactttgggaggccaaggcaggcagatcacctgaggttgggagttcgagaccagcctggccaatatggcgaaaccccatctctactaaaaaatacaaaaacagtcagccaggcatggtggcacatgcctataatcccagctactcgggaggctgaggcaggagaatcacttgaagctgggaggtgggggtcagagtgagccaagatcacgccattgccctccagcctgggtgacagagcgagactctgtctcaaaaaaaagaattagttaattaattaattaattaatttaaaaaaaaagaatacactgtcctctcttttcctttcctggaagtctgaagacagaaccatctcatttgctctggaaggagtcagggccaacatcagggagtgggattaagggccagggaggatgctgagttaggaaatacccacctcaccaccctgggggtcaggcccactggactattcaggcagtgagcagcagtacccatgaccatgagccttcttctcacactcttctccccatgtgacttattttggtaacagtttcattgagatataatttattccttcccgtaggacatagctaaaaaaagagagaaagaggtaatttatataccacacaattcacctatctaaaatgtgcaattcaatggattttagtatattcgtagggttgctcaatgatcaccacaatcaattttaaaacattttcatcgcttcaggaggaaaccccataccctttggctgtcacccctcaatttccccaaccctggcaaccactgatttcctttatctcaatagtttttgcctattcttaacatctcatagaaatggaatcacttacatggtcctttgtcactgtcactgatgtcttccacgcagcagaatgtttttggggctcattcaagctgtgcacactccttcattcctggttatagccaaattatacacacaccacttttcctgtgtctcagactgatgtctgggtcagtcatcaatcctattcgtcaatttattctccaaatgcgtctagagcaaataccatgtgaaacccatggttttatggcccccaaagctcccaatccatcttcttgtctccatctctatcatcaccatcccggtctgccaccgtctgtctctgggaccaaggagctttccaaaagtgaaatgttagccttcaacagtgactgcccgcccccaaggacttcccgtgatcttagaataaagacaaagctacctggcatggctatcaacactctgcccagtctggcacttccctccactctgtttcaacttctctcttttggcttcagctatcctgtcttctctcaaacactgtcacttgccaccttgaggccttggcctggaacaggccttatcgctcacctggttaaggccagtttaccttccaggctgcaggtcagtggtctcttccaggagaaacctttgccaaaggagcctcatcatagctctcataattctcatatcactctgttcctttcccactctgtctcccttctacactggaagctctttgagggtgggcattgtctacttatgctcatcattggtttccctctacctaacagtgcctggattagaaatacagaaaggacatccataccaacatttatagtgtgccctgtaaccagacacttttattgattaatttttttagttttttaaaattttattttaaattccaggatacatgtgcaggacgtgcaggtttgttacataggtaaatgtgtgccatggtggtttgctgcacctgttaacgcatcacttaggtattaagcccagcatgcattcgctatttaccatgatgatctccttcctcctgcccccccaccccaagccccagcactgctgccccaccaccaggccctggtgtgtgttgttcccctctgtgtccatgtgttctctttattcagctcccacttataagtgagaacacccagtgtttggttttctgttcctgcgttagtttgctgaggataatggcttccagctccatccatgtccctgcaaaggacatgatctcgttcctttttatggctgcatagtattccatggtgtatatgtaccacattttctttatccagtctatcattgatgggcatttgggttgattccatgtctttgctattgtgaatagtgctgcagtgaacatatgcacacatgtatctttataatagaatgatttatattccttttggtatatacccagtaatgggattgctgggtcaaatggtatttctagttctaagtctttgaggactcaccacactgtcttccacaatggttgaactaatttacttccccaccaagaatacaaaagtgttcctatctctccacagcctcgccagcatctgttgtttcttgatttgttaacaattaccattctgactggtgtgagatggtatctcattgtggttttcttttgcgtttctctaatggtcagtgatgttgagctgtttttcatgtgtttgttggttgcataaatgtctttttttgaaaattgaccagacacttttataaagactatcttgtgtcatcgttatgataatcctatgtggaagttatcttcagcttcattttaccaatgagataaatgaaactgtggtagtataaataaataacttgtctaaagatactgagtagcagaggaagcattccatcccagacccattgaattctcagatctaagatcctgccaggctgtttctggaatacagagcagaaaattccctcctgttcaagcgctaactagataagtccttcttcacaaatgccaagtaagcacagaaaaagagcaacagggaaaaagtttatgctccaaggaagaagtcaaccccagactgcagggatcgtggtgagattgtatcaggattggaccttggggaaagcttccttatatttgagactcataaaaaaaaaaaaaaaactccccacaggtggtcagtttggttcttactggcttgctggaagtaagttctcatgtttctaaatgcagaccgggtatttcctttggaatgttctcacattgttttatttttgggtgtcaaccttttcattttagtccagcaaagaactccttgttcgtttcctttgggggatttatttttcctcctttttctgaggcggcagtacctctaccaggaaaaactgattaccagtgctgtccccagagttgtcactgaggtgtttccaccgaaagcttctctgtcactttgaggtcacctgagagcatgagagccaggctcactggtgacctcatccctctggccctattccagcagcttagctttgagcttcatcatcacagtgcagcagctgactacttgctaactaacgtgttatgccattgataaccaggaacttcctgactgacgttgaacgggaaaaggatggcggatcagaacccctagaaggaggtcatcttcatattacaaaggacagcccatttagggaagtgactttggtgttgtttaatagattccctttgctctgaagcaccctgggtatgttcttttataatcaaaacagctgatcacttttcttacagagataaatttgctcaaaaataatgcatctatgtatacaatgaaatattattcagccttaaacaggtaggaaattctgacatgtgaatgaaccttgagaacatgatgctaagtaaaacaagccagtcgcaaaaggataaatactgtacaattccacttttgtgaggtccctagaatagttaaattcatagagacagaatgtagaatggtgtttgccagaggctagagcagaggcccccagcccccaggccacagaccagtaccagtctcactcacattactgcctgagctccgcctcctgtcagatcagctgcagcattagattctcacaggaccacaaaccctactgtgaactgcacaggcaagggatctaggttgttcactccttatgagagtgatgatctgtcactgtctcccatcacccccagatgggaccatctagttgcaggaaaacaagctcagggctcccactgattctacattatggtgagctgtataattatttcattatatattacaatgtaataataatagaaacaaagtgcacaataaatgtaatgcacttgaatcatcccaaaaccatcccccaccctggtttgtggaaaaattgtcctccacaaaaccagtccttggtgccaaaaagactggggactgctgggctagagagaggggttagagggagttcgtgtttaatggggacagagttgttgtttgggaagatgaaaaatttctggaggtggatggtggtgatggttgcacaatcatgattgtacttaatgtcattgaactgtatacttaaaaatggttaagatgaggcccagtgcagtggctcacacctgtaatcccagcactttgggaggccaaggcgaatggatcacctgaggtcaggagttcgagaccagcctggccaacatgatgaaacctcgtctctactaaaaatataaaaattagctgggtgtagtggtgggcgcctgtaatcccagctacttgggagactgaggcaggagcttgaacctgggaagtggagattgcagtgagccaagactgcaccattgcactccaccctgggcaacaagagcaaaactccatctcaaattaaaaaataataataataatggttgtgatggtaaattttgtgttgtgtatattttcccacaataaaaaaataatgtgctgaagatgcttctcaaagtcttgcctgctatcctgctacttgttcatcaattgcaatttggcctgccacctaccttcttgaggcttgttcctcaaagtatggtccctggaccaggagcagcagcagttggaagcttgttagacatgcggcatcttggccagatgcgggggctcatggctgcaatcccagcactttgggaggtcgaggctggcagactgcttgagctcaggagttcaagactagcctgggcaacacagcgaaaccccatctctacaacaaatatatatatatatataaaaattagccagatgtggtggcatgtgcctgtaatcccagctacttaggaggctgaggtgggaagatggcttgagagcaggaggcagagattgcagtgagctgagatcaagccactgcactccaacctgggagacagagccagacgctgtctcaaaagaaggaaggaaggaaggaaagaaagaaagaaatgcaaatgacttaggccaggtgtggtggctcatgccactaattccagcactttgggaggccaaggtgggaagagcatttgaggccaggagtttgagaccagcatggtcaacatggtgaaatgttgtctctactaaaaatatcaaaattagctagatgcggtgatgcacacctataatcccagctactcaggaggctgaggcatgagaatcacttaaaccctggaggcagaagttgcagtgagtcaagattgtgccacggccctccagcctgggtgatagagcaatactctgcctcaaaaaaaaaaaaaatgaaaatgatttatatgcaggttaaggtttgtggagggctgttctggatcagtggtgggcaagtctgcaggcacactggaatcacctgtggagttttaaaattactgatttgattggtttagtgtggccaggcatcaggatttacaactgctcacattagaattcaagtaattctagtgtgcagccaaggttgggatcaacagatctggattatcttttcttctaacccttcagtgttttcacacttttctcatctcagtgaacacttatttcctggggcatcatttctgcttgattctttttaatcatttcaattcctttgttaaatttatctgataagattctgaattcattctctgtgtgatcttgaatttctttgagtttcttcaaaacagctattttcaattatccgtctgaaaggtcacatatttctgtctctccaagattagccccggtgccttatttagtttgtttggtgaggtcactttttcctggatggtcttgatgcttgtgtatgtttgttggtgtctaggcatagaagagttagatatttattgtagtctttgcagtttgggtttctttatattcatcattcttaggaaggctttacaggtattctaaaggacttgggtgttgtgatctacatttgtggtcactgcagctgtatctgcattaggtgctaccccaagcccagtaacactacggttcttgcagagttatagaagccttggtgtcttggataagatccagaagaattctctagattaccagacaaagactcttgttctctgcccttattttctcccaaacaaacagtctgtctctctgtgctgagctgcttggagctaggggaggggtgacacaagcacccctgtggccaccaccactgggacggtactgggtcagatcaaaagccagcacagaactgggtcttgcccaaggcttgctgtaaccacgacctacgttcgctcaaggccctagagttctctaatcagctgatggtgaagccagccagccttgtatcattcccttcggggtggcaaatcccctgagtgggtccagagatgctatccaggagctagggcctggagttggaaaccttaggaatctatctggtgctctattctactgcagctaagctagcactgaaaccacaaaaaaaataaaaataaaaaaaaaataaaaaagctcttcccactcttccctcccctttccccaggcagaggagtctctccccgtgtccaccactcaccactcccacaggtgcatagggaaggtgactgactgccaggacaccaccaatgtgcccttaaggcccaagggctcttcagtcagcttgtggtgaatgctgccaggcctgggactcacccttcagggcagtgggcttctctctgggccaggttaggtccagaagtgcagtccaagagccacggcctggaattgaggacccccagaggctgcctggtgctcttctccactgtggcaggcctgatacctaagctgcaggaccaagtcccctttattcttcttttctcaagcagaaggagtctctcctcagagccactacagctgggaatatgctgcgtcacatctgaagccagcacatctcagagtttctcacccggggcccacagcatatcctacctggctaccactgctgattattcagggctcaagggctctttagtcagcaggtgatggatcctgccaggactgggtcctccccttcaaggcagcggattcccttctggcccaggtgtgtctagaaatgtcatccaggagctagtgcctggaataggggcctcccgactctgcccagtgccctatcctgcagctgagctcgtatccaaggtgcaaaacaaagtcatctttactcttccctctcctctattcaagcagaaggaaggagtcactttcattgctgcaagctgtgctgcctgggattgggggagtactcccttagcacccgtgactagtgtctcactaggttgtgtgcccccacagtaccctggctccaagcccagcgcagcactaggacttgcctgggatttgcagcctttgtggcctagacagccttttaagtttatttaggaccccagggccatttagcccatggtggcaaggcttaccaaaactcaaattccagccactggtatgggcaatgtccctctggctaaggctggtttaaatgctccctccataggcaccagctgagttctgccctgtgctggcagcactgagttctaatgcaaagccccagcctctgcactcctcttcccacaagcacacagtttctctctctgcactaagtagccactactagaggatgggagaggggtggcatcagagattcaagactttcctttctaccctcttcagtgcctctgtcagtgatatgaatttaaaactacgtattgtgattgctaacctgatttttggttcttatgaaggtgctctttagtgtagatagttggcaaatgtggcgttcctatgaacagaacaattgctggaggcttctcttcggccatcttgctctgcatccctccttggggcttgcttgcttccttccttccttccttccttccttccttccttccttccttccttccttctttctttcttttgatggagtctcactctgttgccaggctgaaatgcagtggcgcaatctcagatcaccacaacctccgactccctggttcaagcgattctcctgcctcagcctcccaagtagctgggattacaggcacgtgccatcatgcccagctaatttttgtatttttagtagagacagggtttcaccatgttggccaggctggtctcgaactcctgacttcaagggatccgcccgtctcggcctcccagagtgttgcgattacaagcgtgagccaccacaccttgccattagccaccgcgcctggccagttctgtttgaaaagtctgaagttttgtttgaaaagtctcagctaggagtggtggctcatgcctataatcccagaaatttgggagaccaaagcgagaggatcgcttgaatccgagagttccagaccagcctgggcaacatggtgagatcccatctcttaaaataaaataaaataaaataaatagccaggtgtggtagcaagtgcctgtagtcccagctatttgggaggctgaagtggaagaatcacttgagcccaggtgatcaaggctgcagtgagctgtgatcatgctactgcactccagcctgggtgtcagagagagactgtgtctcaaaaaagaaaagtctcatcctcttggtttttttcataatctaaatgcatgcaagagagagacttcttgtgacctcattaattgagcccctcatcagggcatgaaaacatttatattgattcgttttctagataactaaaacttaccacttttgtgacaaaaaaaaaagttcaaaattgtgatcatttggatgaaaatatctaaaatgggcctggcgtggtggctcacgcctgtaatcccagcactttgggaggcccaggtgggtgggtcacctgagatcaggagtttgagacaagcctggccaacaggatgaaaccccatctctactaaaaatacaaaaattagctggacgtggtggtgggtgcctgtaatcccagctacttggaagtctgaggcaggagaatcgcttgaacccaggaagtggaggttgcagtgagccaaaataatgccactgcactccagcctgggagacagtgagactctatctcaaaaaaaaaaaaaaaggaaaatatctaaaatttatttgtgtgtccccaattctcaatagcaggtccatggctcattcaatggctcattcaattattagtgagtatgcttaggtgtcaggattcctgggactcagaaaatcaggacaagtgctgtgatcacagagctgtatcaacagtgctaattaatagagaatatttggtaacagacatgtttaatattagataaggagactgcatctggacactgaggaaatcctgggcaactttagccaagtgaactcattcacctcacttgttatgcctgagaactgagtcctttctccatgaaaacaaatacagaccatctaccatgcgacagcaactgctgaggatctagaagtataatggtgaatgaggaggctcctattcccactgagctgcaccctagtctaagagatgggcaagaaacaaatgaccaaacaggcagaggtttataatctgaggtgttagtaaaagccatgaagagaaataaagcaggatcgagagctactattttaaatcagtgcttctcaaattacccgaggtgaggaccagtttttcttttttcaatctgttttggactttttttttttttttttttttgagagatgaagtctcactctgtcgcccaggcttgagtgcgatggtgcaatcttggctcactgcatcctccgcctccctggtccaagcaattctcttgtctcagcttcccaagtagctgggacgacaggtatgcacagccatgcccagctaatttttgtattttttagtagagatggggtttcaccatgttggccaggctggttttgaactcctgacctctgggtacagagcataatatggttctaaactatttctgtttggctttaaaatcatttataacagagaaaccaaaatcgcaaggtgatagaaatagaagaagaaattttgaagcattggattaagcccaggatattaattttttcacttttctgcaaaaggaagcaagtgatgctgtattttcaaaatgtatctttaatcattcgtcagtaggcagtcccaacaatttctcctgtaaaattacaggtcaatttaagctattttgtgatggaaaaaatagattccagatctaagaatttcctatttgtgtatcttcttttgatggaaaacaaaattcaaaacattttgtcaaattcataagacatgtggtggtaagttttgacagatgtgcaatatcaagattatcacctattttattgataattatggaacatgtatgacaatctataatcatagcatctgaaggaacagtactggcaagtttctaacttctactttttccttttaatcttttgaaaaatatattgtactccttccttgcatggaaatattaagattactcaaaatactgatgatatcaaacaaatcagcaagattgtttttacattatttacatctttaaaaaggtggaaccaaggctgggtgcagtggctcacatctgtaatccaagcactttggggggccgaggcgagaggatcacttgaggtcaggagttcgataccagcctggccgacatggtgaaaccccatctctaccaaaaatacaaattagctgggcatggtgctgtgcgcctgtaatcccagccactggggaagtgagtcaggagaattgccggaacctgggagttggaggttgtagtgatccgagatcgcaccactgcactccagcctggagacagagtgagactccgtctcaaaaaaaaggtggaatcaacctattttttaatctttcagaggcgcagagtttgtttcacagttcaaacattcttgatggatggcctccttttgacaaacatcgtacctcaacatgcagtgttacatataatcagctttcatattgttacataaatataattatcttaattttaacacattagcttttatttaattcacaattcttactataatgctcatcacattgactttttttttgtagtaagatgttatggaggaagcagtatgttggtttatattccagtgtaaaatccttaatctgtgtatctattctagaaagctttcctgtcattgcggctacaccatcagaactcacccagacaggaagcttaaagtgcaaactacacttaaaccaatataatccttcagagttttaaacagctcagagctacttgtgtccataggcaattaagttgaaagaaataattatttatttgatagcatcatcttcaaatcacacatatactttaaaaactgccattggcagccatatgtggtggctcactcctgtaatcccctcattttgggaggccaaggcaggtagattgcttgcgcccaggagtttgagaccagcctggaccacatggcgaaaccctgtttctacaagaaaaaacaaaaaatacaaaaaattagccaggtgtggtggcacacaccttagccctggttactcaggaggctgaggtgggagaagttgaggctgcagtgagccatgagtgcattgctgcattccagcctgggcaacagagcaagaccctgtctcaaaaaaaaaaaaaaaaaaaaaaagactgccattggcaatatgtgtacattagtcaagttgcaaagaaaatactagcttaatttattcagttggttggtttctgtagttcctgaatacactgagctataatatcataggaaaatggtacctgagctaccttctctgtcaaagatttacccatttccaaataaaattttttttttttttttttttgagacagagtcttgctgtcgcccaggctggagtgcagtggcacgatattggctcactgctatctctgcctcccaggttcaagcaattctcctgcctcagcctcccaagtagttgggattacatgcgcccaccaccacacccagctaatttttgtatttttagtagacacggggtttcaccatgttagctgagctggtctcaaactcctgacctcaagtgatccgcccacctcagcctcccaaagtgctgagattacaggcatgagccaccgagcccggcctcaaacatcctttcttcaatcttttactaatgtctcagcaactgtacttttcaatcttagcaacccaaagtgctgcttcataagatacctgcaaattactaatgtttgtaaatgaaatatcaagtgactgcttccatcagctttttaatttgttagtctttccttaagaggatttttttttcgttttaaaaagagatgaggtctcattatgtttcccaggctgctctcaaactcctgcgttcaggtgatcctcccgcttctgcctcccaaagtgctaggatcacaggagtgagccaccgcacccagcaaaaggattattttggtattgaacttttcacgctttctatgtaaatgctgcttaagttttgatggtttcaaagcataattagccagtacagctctataaataacacatcatagtttttagcaatttgccatcaatgatcgctacaaacccaacattaatacataagtgaatatatatctgagtaaattagtatatatgattttgcttttatgctattggaaataacatctgttgttactatttggttgactatcactgctatttttggaaaaaaacaagtcttttcttgacaaaaatagtccagtaaatcttgtgtcaccatcagtaaattaaggtaaaaaatacagaaaaccaggcacagtggctcacacctgtagtcccaacactttgggaggccgagacgggcggatcacctgatgccaggagtttgagaccagcctgctcaacatggcgaaaccccgtctctactaaaaacacaaaaattagccgggcgtggtggcctgtgcccgtaatcccagctactcgggaggctgaggcaggagaatcacttgaaccagggagtcggaggttgcagttagccaagattgtgccactgcactccagcctggacgagagtgagatttcatctcaaaaaaaaaaaaaaaaagcaaaaacaaaatacagaatacaaaattgtctttacaactaataatgctaaactataaattgaaaggcaagcctaattaagggctaaaattacgataatgtaataaattatgaaaatgtatgtgtggtcctaacatgcacgactaggatgtagtgcactctacatgactcagcacctgaattcaaagccccccaaactcatctataccccggtcagtgagacaagtcactgtcttggatattgcagcaaattctagatgtgcaccttcaaaatttctgggctcaactcatggccaaatggcagcaaactgttcacagacaaactccggtctgtttgcctcacttggagtagcaccgttttaaaatggcagggattgaatcttgatagaggtgacatttgagcagaaacttgaaagaagggaggctacccgtcttattcatatttgggggaaggcagtgtaggtagtagggccagcaggtgtaaacttcttcctcaggcagaaacatgcttgtgtgctttagaagtagccaccggggcagcgtggtggccgcagagtggagaaggggcagggccacgtgggatgaggttggagacagtgggcaggggctagatgacactggctttgtagtcaagataacaacttttgggccaggcgcggtggctcacgcctgtaatcccagcacattgggaggccaaggtgggtggatcacctgaggtcaggagttcgaaaccagcctgcccaacatggtgaaaccctgtctctactaaaaatacaaaaattagccgggcatggtggcacatgcctgtaatcccagctacttgggaggccaagccacgagaatcgcttgaacccaggaggcagaggttgcagtgaaccgagatagtgccattgcactctagcctgggcaacagagtgagactctctctcaaaaacaacaaaaaaaccccttttgattttgctcggagtgggggatttgagatggggagtgacatgttcaggtaagtaatttactcccaaattaaacttcccaggattacccacaattcccctgcatatggcaaatcttgcagtagatcaggagggtctagggtcaagaggatgaagcaaacgccactgaagcggctacgttgtctggggtataaacccggggttcggccgggcatggtggctcacacctgtaatcccagcactttgggaggccaaagcgagtggatcacctaaggttgggagtttgagaccagcctgaccaacatggagaaactccgtctctactaaaaatacaaaattagcctggtgtggcggcgcatgcctgtattcccagctacttgtgaggctgaggcaagagaatcacttgaacttggaaggctgaggctgcggtgagccgagattgcaccattgaactccaacctgggaaacaagagcgaaattccatctcaaacaaaacaaaacaaaacaaaaaaacccggggttcattgtcgggtaccagagtaatttaggacacagacacacaggaggagtttaggggtggaggtttaacagttagaagagaagagaaagaaaaacagcttcctcttaaaggaagtgtgtctggagttggttcctgccagtgggtttgtggtctcgctgacttcaagaatggagccatggacctttgcagtgttagaactcttgaagatggcacggacccaaagagtgaacagcagcaagatttattgtgaagagctaaagaacaaagcatccacagcgttgatggggacccgaggcgggttactgctgctggctggggggtggccagcttttattcccttatttgtcccctcccatgttctgtttctgtcctgtcagagtgcccttttttcaatcctccccgcgattgcctacttttagactcctgccgatggttgcattttacagagcactgattggtgcattttacaatcctcttgctcactacagagtgctgattggtgcatttttacagagcactgattggtgtattttacaatcctcttactagctacagaatgctgattggtgcattttacaatcctcttctaagacagaaaagttctccaagtccccactcgacccaggaagtccagctggcttcacctctcagaaggagtctctgagcagaaaggaccagctggtggagaacgcaccgagttttatagtccagtttgaggaggtgttgtctgatttactaggcctcacagattggttccatcatgtatgacatttacaaagctctctgggaaggcttgtcgccctaccctaatcttcttatgcaaatggactttccagttgatgggggccatattatctgcttcttaccgtacacgtggctggcagagaaggcaagatggagccaccatcttgaaaaggtctagtccttagttcctgctggcattcatctgtgcagcaagctgccagcttgcttgtctatgtctgcagctcaacttttatcagctgctctttgttagaaaattatttggggctgcttttcattaaaaggaaagccctaccaaggactcccatgcccttgctatctccctaagtaattcctttttacctcctatatcaccacaagccagctttcctgggagtcccctagtttctctccaggccctaggtcacttcctatcaccactgaatctgtcagcatctttttggtgcactcaggcctcctggctctcctcctcagtatagccttgaattaatcaccaacttatcacatagtgaacagatgtagccttttccaaatcactcagggtcttcattctgaacccaaatcaccactctgtgctttaaaatatctctcccttgcagtttggtgtgggtgtaggactacattctggccaatggagcttgagcagaagtgatacatgcaactttcaagtcatgccccgtgcccgttcttttctttctgcaggagggaatacagatgaattggcaggatcaggagcagccatgttgcaccaagagaagatgaaaaaagcatatgttgcagattgcaaagtaactaggtaagcatttgagtccctaaaactattcctggtatgactggtagcggcatactagcttggacttttttgtgtcagagaaataaaccttcatctcacttaaatcagtattatttggggccactctctctgtagtaggagtgaaactagtatcctaactaatttaactgtcaaaagaaaaaaaaatatgaggcgagaaaataaggaatcaagaaacaaaagtcaagttttactcacttcatagcttggctcaaaagcaactttaaatatgtgagaaatgcaacaaatgataatcatgcatacagagaaattcctcaagtgacaaatgcttttactttcatttcctttcttgaaaattgacagagtaagattcagatgcatgtactgacactcacgtcagtaacatcggctcaggttagactttggtcgtcttatccttcgactacctaagggactcatggccagtatattttacaacccccagtgccagttactgaattctcacctgagaatgaattccctaagtctgtaatgtttcatcatcttgcaacacagataagcctgtgtttagagcaggcttttccatatgagtccctcctctttcacactggggctgagtagaaggtgattgacctgcctgagactttatcagtttggagttcatgttccatgtggtgttggagggagcaatggaggctgtgaaatcagacatcctgctttttgacagggttgtttgatgactcacccaagccattttttattctcggtgcatattctagtttcccttctcccgacagtagcctgatgcacctgtgcttgcactgtccttaagcctgttgctattgttatgtggtgtcactgagcccaacactgcgtgcgtgtgtgtgtgtgtgtgtgtgtgtgtgtgtgttgaaaggggtaggaaagtgaggatgattttcaaccattaaacccttaaggggccatcttctgaagcctggcatcatcatttttgttctcaagaacatttaagtcaaaaataacaaggttccttttgctcatcttcaaattattttacttgtttgatccaactgctaactagaaggtgaattctttctgctgtcatttcataattctagtgtattaaaaagagatgggggctgggcacggtggctcatgcctgtaatcccagcactttgggaggtcaaggtgggaggatcacttgaggccaggagttcaagaccagcctgagcaacatagcaaggcctcctacaaaaaattttaaaaattagctgggcatggtgacacccacctgtagtcccagctgcttgggaggctgaggcaggaggattgcttgagcccaggagtttaaggttgcaatgagcttcaagtttttataccttcaatcataccatttgtggcttaggaacccctaatatattacatggagggtaatgtagacaccaagaaaatgattgaaaacaatttatgcctaaatacatttgtattcttctttagagaaacctagtagacaaactaaaagctactaagcaaataaatcaaggtactgtattttacaaaatgactcaatttatgcatcatttaaagagtgtggatcccttgggaactttaaacatggttgcattagttaaacagttgcttcattcagatccctctaggaacttgggcagcacaagggaaggggggcctctgttcctactgtgtggtcctggtgatctgtgtaggtatcttcttttaccgggttaagtgataaaaacggtgtcttgtgctcttttatccaagtccaaggagcatctttgtgggtgtggggttgcaattatacctttcctccctgggctgaatccacaaagaagaagagaaaaataacatttctggagacctggccaagccctggaataaaatggttgcctgagagaaactgcaagtttgggaggcggggactcttttcattgtaaccaagagtggagtcctccatttctttttcttttttctttttctttttttttttttttttttttttttgagacggagtctcactctgtcgcctaggctggagtgcaatggctcaatctcggctctctgcaacgtctgcctcctgggttcaagctattctcctgcctcagcctctcaagtagctgggattacaggcgcttgccaccaggcccagctaattttttgtatttttagtagagataaggtttcaccatgttggccaggctggtctcgaactcttgacatcaggtgacccacccaccttggcctcccaaagtgctgggattacaggtgtgagccaccgcgcccggcctcctccatttcttttactttcctttagtcaataatggagacagtgaaggcataaaagtgttcatgctaaagaccattttgaaaatccagccacttcctgtctgttacactccagctgcctatgtcctcatcgtgtaatgggagggtcactctagaagaggaatgggccaccgactgtctaatgtgaccatcctcctgctgaacttggggaaaatgtcactttttgctctgaacccagacctaacctctggatcttgctctatgccatgctccagaaagccaccactatcaatgtgagttgccacaaaaattcaattttttgtttaatagacttaggatcttcagtgaaacttatggccatccccagtggtcacttccatctctaacatctcacgactttatgaaaataaaacaaccagctatcatcagggagagaacacagagttaggagttagtggataagggtgagggtcatgggtgagttacttcccttctcaagccccctactctctccttcagatctacatgttactgtctcaggccaggttccctgaccatcctgtttgcagtgacaactgttgccccccacctctaagtactccctaccccacttcccgttttatatctgatcattagcatttgtgatggttaattttatgtttcatcttgactgggtcatggggttcccagatacttggcaaaacgtcatttccaattctgtctatgagtggatcaccctcctcaatgggctgttgagggctttaaggcagaggaagggagaatttggccttttttttttggagacagagtctcactctgtcacccgggctggagtgcagtggtgcgatcttaactcactgcaacctctgcctcccaggttcaagcgattctcccgcctcagcctcccaaatagctgggattacaggcacatgccaccatgcccagctaatttttgtatttttagtagagatggggtttcaccatattggccaggctggtctcaaactcctgagctcaagtgatccacttgcctcggccccctaaagtgctgggattacaggcgtgagccacctcgcccagccctgaatttggtccttcttttctgccagatgacttgagctggaatatcactctctccttccctcagactgcagtttacatcatcagctcccctggttctcaggcctttggactcagattgaatgatacccctggctttccccagctgccagcttgcagatggcagatggtgggacttctcggcctccacaatcacataagccaattccttatgataactctccttctctttctctcctctcccctctctattttgagctgattattttgggaaactgcaaccacaggagaagctctgaaaacagagtggaagttaccttatcatccacattaccccaggaggacaggatgactctaagtcactggagacagttatcctttattgatggagaaggcactgacttaaatctccataacaaatcttactcttatttgccagtttttcctgagcataatcaactttccctacacccttctttttgtttcagcagacatggcatttaagtgtgagttcaaagccacctctttgaaatttaccaatttctctgggtatctccctgtatactacacgaggtatacatgttaataatcttctgtttatttgtctctttttaatctgttttttgttacagtggcccatcccaactaagaattatgaaagattgagagaaaattatctatttccctacatttatagtaatgtaaatagcatagccactctggaaaatatcagtttcttaaaaagctaaacacttggccaggcacagtggctcacatctgtaatcctaacaccttgggaggccaaggcgggcagatcacctgaggtcaggggtttgagaccaggctggccaacatgtcaaaaccccgtcactactaaaaaatacaaaaattagctgggagtgatggcaggcgccaataatcccagccattcaggaggctgaggcaggagaatggcttgaacctcggaggcggaggttgcagggggcaaagatcgcgtcactgcacttcagcctgggcggcagagcaagactctgtctcaaaaaaaaaaaaaaaaaaaataggccaggcacagtggctcaagcctgtaatcccagcactttgggaggccgaggtgggcagatcacgaggtcaggagatcgagaccatcctggctaacacggtgaaaccccctctctactaaaaatacaaaaaatcagccgggcgcagtggcaggcgcctatagtcccagctacttgggaggctgaggcaggagaatggcatgaacccgggaggcggagcttgcagtgagccgagattgcgccactgcactccagcctaggcgacagagcgagactccgtctcaaaagaaaaaaaaaaattctgatccccgaatgctcagggagactgatttgagtaataatgaaactctggtctcccacacagacagctctgcatgaatgactctttctctgtagaaattcccctatcttgataaaacagctctgtctaggcagtgagcagggtgaacccgctgggcagttacagcatgaggcagccttgtagtgatggcacagttgtgtatctcgattgtgttggtggttacaggaagctacactcgtaataagattgtatagaagtacacacgtgtgtgcttataaaaacaatgaaatctgaatcagctctgtggagcatttcaatgtcaatttcctgattttgattttgtactgtaattattcaagatgttaccaccactgaaggaggctaggtatagggtacactgggcctccctgtacactttctttgaaccttctggtgactctatcattatttcaaaatgaaaagtcaaaaaagaaattgtagttgggctctcaagcttagcgtgtggtcagtggggaaccacacgggttcaacatgcgcatcgagaagtgttatttctgttcggggcccatctaccctggctatgacatgttgttcatccacaacgattgcaaagtgttcggattttgtaaatctaaatgtcataaacactttaaaaagaagtgcaatcctcgcaaagttaggcggaccaaaccattccagaaagcagctggtaaagagcttacagtagataattcatttgaatttgacaaacatagaaatgaacttatcaaataccagcgagagctatggaataaaactattgatgcaatgaagagagttgaagagatcaaacagaaacaccaagctaaatttataatgaacagattgaagaaaaataaagagctacagaaagttcaggatatcaaagaagtcaagcaaagcatccatcttacccaagcccgtcttgcaggcaaagggaaggagttggaagagaaaatggtacagcagttacaacaggatgtggacatgaagatgcttcttaaacatttctgtaaccatttattttatggacatttgaaaatgccctttggagacttggaactgctaaattattagtttattttttacataagttcatttaaatgaaaagtgattaaaatatatctctcctacactgccatctacaaaacacaagatattacggatgttagattgcatctcagtattaaatcttcactgatatgtgtacttatgtaaatcacgaaaattctacttataactgtagaagtgaattgtggacgtaaaatggttatgtcatctggataatggactagacagcatttgtataatcactaatggcaaaaaatcatggctagtgatgtataaaataaaatattctttgcagtaaaatattcactttattaatgttatagaaggggggagacaacaaggaactaacaatttgtatgacggtgtcaaatattttgattttagtatttcctgttttggtttatttgcatcttagaagagcataatgacattgtttgatgaagcctaattatgctggactgtttcaacttggtttaacctttctgataggtagttgtggatgtttgggatgagaactgaataatctttgcctggagtgacactacactctagaatttccactttggagaatactcagttctaacttctgattcctggtagaaaaaactttatttttctagcctagcaatgatctagaagcagaggaatcctagtgccttttaaaagttattatgtggttttctgttaaaaagctcctgtttttggaaagtagaatttatggatacaacatctgctcattatttgcacataaaataaaaccatttaaaaagaaaaaaattatagttggacataaaacaatgtttaaatttaaaattacctcaggatatagacatgcatggaactaatattttatacataatcttaacttgcttttgtcagtgtatctacttgtaaatgtgtctcaccattcggttccctgtgttctgttgctgaatatggtgttatagcacttctggtatgatagccgtggactgttctctgattttctccattttttgctaatgatgtgtaactatgacatgtggacagtacccggattgcctggtttgatcactatggctacttatgtaagcatctcatggcaaatcttgtcagagcacatatagattctgtgaatctgcatggtcagagtaagcttgctctctttgggtggctggagggttatgaatatttttcacaactgtcacttcctgaacttgacctttggtatactttccagatttgctaatgcatctgctatgcttgaggcatggctttaaaataatataactttttcggccaggtgcggtggctcatgcctctaatcccagcactttgggaggctgagacaggcggatcacttgaggtcaggacttcaacaccagcctggccaacatggcgaaaccctgtctctacaaaaaatacaaaaattagcctggcatggtggtgcatgcctgtaatcccagctactcgggaggctgaggcacgagaattacttgaacccgggagatcatgccacttcactccagcctgggcaacagagcaagactgtctcaaaaaaaaaaaaaaaaaattgggccaggtgcagtggctcacgcctataatctcaacagtttggtggactgaggcagctggttcatttgagctcaggagttggagatcagcctgaccaacatgggtgaaaccccgtctctactaaaaatacaaaaattagccaggcgtggtggtgcatgcctataatcccaactacttgggaggctgaggcacgagaatctcttgaacccaggaggcgaaggttgcagtgagctgagatcgcaccactaaacttcagcctgggtgacagagtgagactccatctcaaaaaaaatttatatatatatatataaagattatatatataaaatattatgtatataatatatatataactttctcaaagcaaacgataccattttgatctcctattatgtactagttgttacatatgttatcttatttagaacttatactaatctagtgaaatatgtgtttctttccttgtagaacataaacaagagaaattatttatctgaataaatgttgttcctaagcaccgttattccagcaatgctgttgtgcttcacagccctgttaaacgtgtcttttaggcttgttttctgactctgtagcacatccttttgactgcactcagttgtggaaaattttgatctttttaagtgtaggcatctgtagtcccagctatttgggaagctctgctgggaggatcccttgagcccaggaggtagagggtacagtgagctatgatcgtgccattgcactccagcctgggtgacagagcatgaccctgtctcaacagcgtctcaacaaaacaacaacaacaacgaaaccaaaccagccaaccaaacaaaaataataaagtttagaatttgtctacctacttacctacctacctgtatctatcatcaaaagtaattcagcacaaattaaaataaggaagtatttttaacttacaggttatagaatgcatttccaatgccaccaaagatgcagagaaccctctgtattgctggagaaagtgtgaattgctactactttttggaaagcatgttgacaatatattatgtccacagcctttaaaaatgttcacaccttttaatgagtcattctacttttaggcatgtatgatatattttgaaaactttgtaacaattgacatccactgcagccacagtctaatggagggaaacggaaacccagtccaccacctacacaatctattccaaccccaatttaccataaggttttacttctgttatgactttttgcatgcattttttttaacacgttggctttcttgggagggtaaagttttttcaagaactaagtgtattttcaagaacccagcacataatagatgctctgaataaattttattcaccaattttattcactggcttaccacgagccagtcctgtacagacattaatttatttcaagacaaccctataaagtaggcttttctttcatattttataggtgaggaaacttgaggcagagagagaataagtaattagcccaaggtcatacagctagtaagaagtggggtaaggtgggaagccaggcaacctctcctgagctctaggctcttaactgcctctccagtgtgagcagacagtcacaaaatgtgccaggactgcaccagttgatatacatgttaattaaataaacatgaacccaggacgacactgataaataatcatgagaaaattagagcattctcttagtgaaacattatataatcattgacatcatgctttcaaaacttacacattagtctggataaatgtttttaacactaagcaaaaatcaggagacagaagtgtatgtgcagcatggttatacctaacacaaaatgactggaaagaaacacatcaaaagtgtcaagaagctgcaaatcagatgggcattcattcatctctccttttcactgttaatttccattttcctttaatcagcctattagtttgctactgctgctgtaacaaagttccacaaactgggtgacttaaaacaacagaaatttattctctcacaggagcccagaaatctgaaattgaagtttggataggattggttccttctggaggctgttggggagaatctgttcttgcctctcttagcttctggtggtggctgtcatccttggggtttcctggcttgtagttgtgttcctgcaatctctgctgctgtcttcacacgcccttcttccctgagcatcttcatatggccttcttgtaaggagtaagtcattggatttgggttcaaatctaacccagtataacctcatcttaactcattattctgcaaagatcctttcaccaaataaggtcacattccgaggttctgggtacacataaattttgaggggatactacttaccccagtataatgagcaatttttttctattattttatattggaaaaatgtaaacattaagaaaatagaagcttgagcctaacttctatgaagttaggtggatgattaaacagaatcagaatagttgtaactaagtgatggtacagctaaaacactttttccaacatggtcacagacataaagcagcatggcagcttagtacaaatactagatctagaaacttcagcctgggttagattcctgcctccccacctgccttgtgtgcctttgggtgaagggctcaaacattctgaaacttgtcttccactcctgtacagaaagaaagctatgggtattttagacttcaactgtttctagccagacaactggaccttccaagaggtccagcataaatcatttccatggggaagtaaactttttcctgtctttttcctctcactggggctggagagatgggagaaaggagtaaaaaatattttaaagccttgcatgttcccctgggaggccagggtgcaagaagagctcatgaatggatatttggctgaggtgtgacctggagtgttttgcataatgaagcaaggctggttgagctggcagagatccaaggaagggggctggagggatgagggagtctgtaatgggagtgaggagcaggaggtcacagccacgtggcagaagccttgcagcctgtggaggaaagcccacctaggggtgaaggtttgccaagaaattctcaggactgaaggagaaggtgcgcactgttcagcattaggctgtttgcccaggagtgccatcgcattccccagtgtgagaacggccacctcttggtcgttttctcaacctttggtgaacacttatgacatcgtggggagagatggagaaaaggactttgtgttctcatctggggcgtcatgctggggcacccgaacacagaacccatgagtgagccttgaaggggccaactgagccagaggaggttggaagagctgcgccactcctgtcccactgcaggtgggatagagttcccgctaatttcatttacatttgtacctcaaagcacgaagtggtttagctgacttctgctcttcatgaagggcccagctcacatcctttagtaataattcaaacattctgacttgcactgggcagcatgtttatcataaatgcaaggactgctactttggtgtaggaaattatttaaacgtgtaaactctcatataccaatttgcaaatcaaactcttttcaaggctttatttcaatgtcgttgttagcttttttgacttttctcattttcccactagtttgcttgattgcacattatagaaaattcaccattctcattcattctgatcccacatttagacttctctttcaaggacttgaaagaatttataaatatttgcaatacaggatgcaaattaatccttatacacacttggaaggtaccctgcaatatctttccccatctatcactcacccactgtttattgccctctgaacaatgtccagcctagttcctttcttatttcgttacatacataaaattgcttcccatccacaatctctccttagaaatgctgccctttggccgggcacgatggctcatgcctgtaatccctgtgctttgggaggccaagtagggccgatcacctgagttcaggagttcgagaccagcctgaccaacatagagaaaccccatctctacaaaaaatacaaaattacccaggcatggtggcgcatgcctgtaatcccagctactcgggaggctgaggcaggggaatcacttgaaaccaggaggcagaggttgtggtgagccgagatcgtgccattgtactccagcctgggaaacaagagtgaaactccatctcaaaaaaaaaaaagaaaaagaaaaagaaaaaaaaagaaatgccgcccttcccacagctaccctacttaccacgttactgcagactgcaccaccagtgaatgtgacccaagttgcagtaaatgaaatatctcccagaaatttggagttgggacatagggactgagcaacttatcatctctgaaggaccagactggagagaaaggggagagagacagagagagagagagagagagagagagagagagagagagaaactgcctggagttgctactcccagttctcaagttcagttgggtttcttaagatttatctctttataataaatctccctttacatgaattagcatgagtgggttttagttaattaattatactaattttttttttttttgagacggagtttcactcttgttgcccagactggagtgcaatggcacgatctcgcctcactgcaacctccacctcccgggttcaagcaaattctcctacctcagcctcccaagtagctgggattataggcatgcgccaccatgcccagctaatttttgtatttttagtagagatggggttccatcatgttggccaggctggtctcaaactcctgacatcatgtgatccacccgctttggcctcccaaagcgctgggattataggcgtgagccactgcgtccggccaaccaaataattcttcagtcagattttcagagtgagtcttcaaaacaaagtttataaaatcagtgagtacatattaaccatattaggagctaatctcattcatttttctttccttttctatttcctcttttaaaaatgtgaaatgtatcatccatacagaagagtgagcaaaatttacatatatggtttaaagcagcccctggttgaaaccatacgtatgtgttttatgcactcttctaggcctgatggtaaatatttttagctttgcaggatatatagtctctgccaaaactgctctagactgctattacagcatggaagcagctatacgaaatacgtaatggatgaacatggctgtgttccaacagaactttatttataaaaacagatactgggctgatttggcccacaggtcataatttgctgatccctggcttgaggaaaaattttaaagcaaaggtctgtataaccaccactcaagttaagacatagacacagacacatccctgtgtgtccctcctagatgagaacacttcagtcctctctagactgggcccctatcctgacacttgggatgaacattttcttgagtctttttataactttgccgtgtatgtatgcatttctaaacagtatagcttattttgccttattttttgaaaagagaaccgtatttaatgcatgcatccttttttctcctcctcttccttcttggcttgcttttttatgtttgtgaaattcacacacaagtagctgtaatttgccttattactgtacagtttttcattgtatataagacaccagaatgtttgtttgtttcttaaatatattccactgctgattaaaatttgggctgttttcagttggggagcaataatgaacaatgtagccatgaatgtttcaaatgtcctctgaaacctaaaacctattagtcaccaccttgttatttggcagaatatagaagctaacagataagggagccttggtgacacagtgaataaagattagcccccagccattcagagcagagaggagagggtggagagtaactctcaagggcagtccaagaatatgcagcactcatgtctcaacgactttcaaaggattgaaagaagtcacagcatcttctctcaccaaatgcaatttaatagaaatcaacaataaatttatatagaaaattctcaggctgggcgcgatggcttatgcctgtaatcccagcactttgggaggccaaggcaggcagatcacttgaggtcaggagttcgagaccagcctggccaacatggtgaaaccctgtctctactaaaaatacaaaattagctgggtgtggtggtgctcacctgtagtcccagctacccaggagaccgaggcaggagaactgcttgaacctgggaggcagaggttgcagtgagccaaaattgtgccattttactccagcctgggcaacagagcgagactacatctcaaaaaagaaaaaaaagagagagaaaattctcatggctgggcatggtggctcacatctgtaatcccagcactttgggaggccgaggcaggtggatcacttgagcccaggagttcaagaccagcctaggcaacatggtgaaaacccatctctatttaaaatttttaaaaaagaaggagaaaattctcatatgttcaaaaatcaagaaattgttttaagaaccccacagattaaagaataagtcctactgaaaatttaaaaaaaatttttgaatggtaatgaaataccacatatttaaatttgggggtacaactgaagtagaaaatagatgaaaatttgtagcttcatatttgcatgtaatacacagtttaaaatagactaagatagtgtattagtttgttttcatgctgctgataaagacatacctgagactgggcaatttacgaaagaaagaggttgattggacttacagttccacatggctggggaggcctcaagatcatggcagaaggcaaggaggagcaagtcacatcttatgtggatggcagcaggcaaagagagagcttatgcagggaaactctcatttttaaaaccatcagatcttgtgagacccattcactatcatgagaacagcacgagaaagtcccgtcctcataattcaatcatctctcactgggtccctcccacaacaagtgggaattatgggagctacaagatgagatttggatggggtcacagagccaaaccatatcagacagaaatgatgaaaggctgaaaattaatgagctgagtatctatctaaagaacttaaagagccacaaaataagcccaaagaatataaaataagtaaatatatagtagtaataagaaagtaagtagaaagtaagtagtagaaagataagaatagaaaacaatgaaatagaaaacaaatatactgctgggtgcggtggctcacgcctgtaatcccaacactttgggaggctgaaggccaggagttcaagaccagcctggacaacatagagagacctcacctctatttaaaaaaaaaaaaaaaaaaattagcctggtgtggtggcatgtgcctgtagtcccagctatttgggaggctgaggcgagaggattgcttgagcccaggaggtggaggctgcagtgagccatgattgtgccactgcactccagccgaagtgacagagggagatcctctctcgaaaagaaaagaaaacaagcatgcaatagagaggaatgacacaatcataaggtgattccttcatgagaataataagatggcaaaactctggaaagagagtgagaacacatataatgttatgaacgaagaaagaacattacaagccaggcacagtggctcacgcctgcaatcccagtacgttgggaagccaaagtgggcagattgcttgaggccaggagtttgagacaagcctgagcaacatagcaagactccatctctacaaaaaaaatacaaaaattaggtgggtattgtggcatgcacctgtggtcctagctacttgggaggctgaggtggaaggattgcttaagcccaggaggttaaggctgcagtgagccatgatcacaccactgcattccagcctgggtgactgagcaagattctatctcaaaaaaaaaaaaaaaaagaaaaaggaaaaggaacattacttaagcgccacagacattaaaaagatatgagtaagttgtgaacaactttttgccagttcatttgaaaaattaagttaaatggacaatttcatatagacatatattatataggaatctctatcataataagtgagtacaaagtgagtaattgtaatgctcagatctggggaggatggaatctcagggaggggagctgcatttccactgatatttggtgatctaggagcgggtgcctgagaggctgatcaatgcttttggacaaccttgcagggattgcagggagaggtgcactggcatcctggagtccagggctgccaagaaggtaaggccccgatgagcaacttttgctttgtgttagaaccctgaagggctacacgctatgaataggggtgaactagaatataacacactattgttgggactgcagctcaacctcaaatcttcccagtctctcaaattggattgctagtgttccaggctcctggcaggggcaaatttctctagagaaagatggcatcaacctaggcatcaaattatttctaaaaataattttgcaaatataaagtccagcacagaataaaaaacaacaaggcagccaggcacagtggctcatgcctgtaatcccagcgctttggggggccgaggcaggtgatcacttgatgtcaggagttcgagaccagcctggccaacatggtgaaaccctgcctctattaaaaatacaaaaaataggcgtgctggcgcaggcttataatcccagttactcgagagactgaggcaggcgaattgcttaaacctgggaggtggagattgcagtgagccaagatcccaccactgcactccagcctgggctacagagtgagactccatctaaaaaaagaaaataaaagagaagaaaaaagacagccaggccacatgtggagacaaaatactatatgagcaaaaaagagcagaactagcaaaaattgaaacagacctaaaggaactccagatactggagttagcagacaagacttgcttatgatattcaagattaaaagcaagacataatttcagcagagatctgaaaactacaaaaaagacccactacaagaaaggattatttcaggctaatctcactcatgaaaatagttgtaaaaatcctatgcaaaatatttacaaatagaatccaacaatatgcaaataggcaataagtaatgatcaagttgggtgtttttttttccccaggaaaagaagatttatttagcactcaaaaatcaaccattgtaattatctacattaccagaacagaggagaaaaaaatgtaaaatcacgtcaaaagatgtagaaaaaaatttgattacattcggtatccattcggtatccatttgtcatcaatggaaaaaataaaaagaaacttccttatctgataatgagcatctacaaaaagcctattgtgaacaccataattaatagttaaatgttgaaaattttcttttgatttggggaatagggcaagtatgttggctaagtcctcttggaagcagacgtcaagatggatttagaagtgcaatggatttattggaggcaattcccatgaaagctcaagaggggaggcagcaagagagggcagagaaagcttcagacctaaatgctgatctgacccctgtgcaaggagaagggaaggaagaggataaggtaggaagaacagcaaattacactgcagctctgagaatatcttgactagccgaatggggagctgtggctcaaagatttcccatggaggagtcccacaccggccaaaaagatgagtccttgcatcactgccaagcccattaattgattgaaggctgctctggaaatctatggcccagctcaaaagctgaagaagatgctgaaggtgcctgcagccagaagctgtgagccaactgcactctccaaggcaggttttttttttttttttttttttttgagatggagtctcactctcacccaggctggagtgcagtggcatgatctcgactcactgcaacctgcacctcccaggttcaagcaattcttctgcctcagcctctctagtagctgggactacaggcgtgtgctaccacgcatggctaatttttgtattttttgtagaaatggggtttcaccatgttggccaggctggtctcaaactcctgagctcaggtgatccaactgccccagcttcccaaaatgctggaattacaggcatgagccaccgcacctggcttctgttttgaaggaagatatgagagactcacctccacatctgccacaagaatattcaatatcaccacttctattcaatattgtactagaggtcccagtcagggaataaagaatagaaaaatacagagaataaatttagaaatttagaaagaaacactactgatgttatttgaagatttagaaagaaatgtatacatttagaaactctactgacgttatttgaaagttatatggctgtgtatatacaatattctaaaggaatatataaataagcatttagaataagtgagttaagcaattttgttgcatataatgtctacgtaaaaaggcaactgtggcctagtgcagtggctcacgcctgtaatcccagcactttgggaggccaacgtgggaggatcacaaggtcaggagttcgagacgagcctgaccaacatggtgaaaccctgtctctactaaaaataaaaaaattaaccgggcatggtgccacacacctgtaatcccagctactcaggaggctgaggcaggagaatcgcttgaacctgggaggcggaggttgcagtgagccaagatggcaccactgcactccagcctgggcaacagagtgagactccgtcaaaaaaaaaagtcacttgcatccttaaatagcagtagcatagaaaaataaggtatcaggccaagtgcactggttcatgcctataattccagcactttgggaggttgaggcaggaggatggcttgaccccaggagatcaagaccaacctaagctaggcaacataggtaagaccctgtctcaacaaaaaataaaaatatcgaccaggcatggtggcacatgcctgtagtcccagctacttagaaggctgaggtggaaggattgcttgagcccaggaggtcgaggttgaaataagccatgctggtaccacttcactccagccttggtgacagagagagaccctgtctaaaacaaacaaacaaaaatcaggtttcaagaaatacaatttaaaaatgatgcgcaagagctttacacagagaactgtaatgcattattaagagaaatacacacacccactcccgcaaataaaagaagaaacaaaccatgttcacaaattgttagaataaatattgcaaaaatgtcacttctctgtattgatctatggattctatttacattttacaattttttttttagagacaaggtgatttaaaattaaacaggttgtacacattttcatgtttcttagctactggatatcaccttttataaagcgcatgttccaattgcttgcctatttttccctttattgtctgtctttttcttattgaattacagaagttctatgtatcttccaagtacaagtccaagtccttctcactatgtgtattacaaatatctttttccagtttgtggcttgtttttcactctcttaaggaaagattttaacttttttctttatgttaaatgcattgtgtgtcttgttgaagtaatccttccctattccaagaacatgagggtattatcttttattatcctctacaaactttattgtttcaccttgcacatttaagtctatgatcaacctgttattaattttagcatacggtgtgaggtaaggtcaagttttattttctttatatgagggttcaatgtaaactgggtattctgggtcaggtgtggtggctcacacctgtaatcccagcactttgggaggctgaggcgagtggattacttgaggtcaggagttcaagaccagcctcgccaacagggtgaaaccccgtgtctacaataatacaaaaattagcctggcgtggtggcacgtgcctataatcccagctgcttgggaggctgaggcaggagaattgcttgaacccaggagttggaggttgcagtgagctgagatagcgccattgcactctggcctgggcaacagagtgagatctatatctatgtctatatctatatctatggcattctgtatatgaatgttgtaataagttctcttatctagtaaagtgtgtctgtccactttattcctcaagaataccttggctattcttggtccttcacatttccatataaaattttagaaccagtttattaaattccactaagtaagagaaagaaaaaaaaacctgttggagtttttatgagaattatattgggtgtggtagcctgtgcctatactcctagctatttgggaggctgaggcaggaggattgcttgagcccaggaggttgaggctgcagtgagccatgatcatgccactgcactccaacctgggtgatagggaggtcaaggctacagtgagctgtgattgccccactgcactccagcctagagtgagtgccagagtgagaaccggtctcaaaaaacaaattaaaaaaagtaaaacaactaaaaagaatacaacatcacttgcatagtagtccttccatttttgcactacctgagcttagtcatgaggaaacatcagacaaacaggaattgggagatatttacaaaggaactgtatttttctcaaacgcccgtatgatgaaagataaataaaagctgaggaattgtgccattataaagaagactaaagacacattagaataaaatgcattgagtgatcctggattggatttcataccagaaaacataaaaattgctatagaggacatttttgagacaattggtaaaattcaaatacgatctatacattggataatagtgttgtttcaatgttaaatttcctgattttggtaactgtactgtggttatataaataaatgtccttgttcttgggaaataaacatacctaatcatttaggattaaggaacctgatgtctgaaatttagccttaaatgttcagaaatatagaatacgtaatatgaattacataaaataaatatagatttatagatagataaaacaaatgaggcaaatgtttttcatagagtagattgtttaaagacactgtactaggctttaatgtaacgtataaattaacattgatttatgcaaaacaaggctgtgaaagcccacacagcttagctgttcaatatacctgatctcaggtatatgaaagaaagaaggcagacctccctcacttcctttgcaaatttccataggccctttctatggcaggataccaactgccttcttagacattctagaggtccagaggtctctcccaattcattagtctcactgtgaattgtagaaagcatattacagagggtcaataaactttggccaatggtagtgatatttgtaagcaataaaagaaggttgggttgatcagtccgttatagaaatcatatttgataacagtaatcttgctttgtaaatctggcttaatagtttcgagccacaatttaaggctgttcatttatatcatcacctgaagtttagaagataccatggcccacataaaggtaatcattaatatcatctttctgtacatgttcttgtcagagcctgccacgtccatgtcccatttagccttcaaactcacagatgcagattctctttctcagctgaagcacaaggaaaaacagttcagagttatattttaaactaatggtctattgactcctagtaccagttaataggctgggctatctctacttttgctggagaataaaatagtatgaagttaactataatattttcttcttacagcaacaacaaaattctgtaagaaagatcattcccacccaatatggtgctctttaaatggtccacagcttaaaatgtatatgaggtcatatacgcttatatttgcctaaagaaattctggagaatagacccaaaactaataaataaaagtaattaattacctgtgagggctggagagatgaaaattctagagataaaggattttaaaaagtattccctggaagacattttctatttttaaattcatgagctatgtgaatatgttaacgattgagaaagaaaaatccccagctatctaggcagacttcccaaagaggcacctttgactttggaatcatttagctgtagttttctgccctgaaagcctcttttgttatccccggtccatcctgcaggtgtggttgataacagatgtcaaagaataggtgaaattttatgaggttaagtgcaaataatgaatatgaccctctttgcggttcttcctcaatcttctattcaaacataaactcagttcatgaagaatgaagtttgtggcattgctcaagaaaggcaggattcaataaaatctttttagggccaaatggaattttttcaactttaatgattttttctttaattatgttaaaggaagctccagaatctcttttaaaaaagtatttgtagcctgggcaacatggcaaaaccccatctctacaaagaatataaaatattatccagcagtggtagcatgcacctgtagtcccagttacccaggaggctgaggtgggaggatcatctgagcccaggaggtcaaggctgcagtgagccactgcactccagtctgggcgagagcgtgagacctatctcaaaaaagaaatcaaactattttttgtatcgttttgctgattacaatggtaaaatatgtttgttgtagaaactttggaatacataaaaattaaagaggactagttcgttaatacataagtcatagtttaacagggtctaagttagccttccatactttgcccatttacaaagtaaggcataaatttcaattcttttgtaatgtgatggtttatgttttctttagataggatgtgatgtaccaagctgagtgttgggaggaactacagcctctcttttgaaatggaagatcctcggcccaagctataaacatgttagtccaaaattcatctggaattttgttgtttgggatgcaaaacacaatattcccatagaaacaatataaaaattatggctagattctaaggcaaggcaacagatgtccatggaatccagcgactcagagcaccaactgtccaactgtgcttcattttcacagaaaaagggaggctagaacatgtctttacctcaaaaaaagcaaaaacaaagtttatgcaaaaagtattttgttatactgatatgataaatatttaatgagacaaatttttatcaattatttacctaaagtgactttatttcttatttactccattactagcaggtttataagcttttcctctcgcctttattcacaatttctattctgcctttactatttttaatggtttccccattccccagttaactccttggcaaagacagaggatgagtgaaaagcttgtggcctgtagactagatatcagaattgatccacaggaaagaacctcttttcagaagccatctttaccttggggtttgataaagaacataaaagcctcaattggtgctatttaatatttgttccgagaccggtatttgcatttagggtgaaatgacttgatgcacattgtttacagctaactctgaagttcaggggaaggggaataatccactgagtcagaaggcaaatataccagactgatcatgagtaaaacaaagccctggtgatcagctcttcctcttattcactatctgtatctagtgaaaatggtcgcatattttcaagtggatttttaaaagctattctcaatgcttttaaaggttttacaacctcaggggaacaatgcatgcaattgaaccacacaataaacagtaaacaccaattgccccccacaatgaaaagctaatggtctttgagaatactctacaacagaatccacttagcagctactagtctcctgctaatggtcaattcactttcggcaataagaacccaggcaaacggcctcataaattttaaagaacaaagggtacaataaatggactgcaaatcgccgcattctctgtaagcagcactctaaggagtgaaatttccaattgctaatggccagtatattggacaagtggagattttcctactgagggaccagagaagatgacaaaatataatggttttcacaaagaggactagaagctggggaaattaagtccttgggtctgtagcacagtttgagctgtgaaagtcgttatgaccagaagattgtctagccttctctgcggtagcctgggaagctgctatcagattgcttgctgtttgctttaatagtgtatcgagaccagaagcacacacactgctagaaccaaaaatcctggatagatttaacaaaatccaccaacctttcagggaggatacataaaaacatccttttttgcattttgatcttgtgggtacttcagaaatgccatttgattcatgatggtaagtagcctaaacgaatgcaatgatatgtgaattgattaaattctgtatcaaaagggatctctaagaaaggaataataagaacaggaaagtggaaatattgtggaaacatttttgcaatagactgaatacgttttcccaaaattctttcctgcctgcctgcctgcctgcctgcctgccttccttccttccttccttccttccttccttccttccttccttccttccttccttccttcctgtcaggcctctgagcccaagctaagccatcatatcccctgtgacctgcacatacacatccagatagccggttcctgccttaactgatgacattccaccacaaaagaagtgaaaatggcctgttcctgccttaactgatgacattatcttgtgaaagtccttctcctggctcatcctggctcaaaagctcccctactgagcaccttgtgacccccacccctgcccgccagagaacaaccccctttgactgtaattttcctttacctacccaaatcctataaaatggccccacccctatctcccttcgcggactcagcccacctgcacccaggtgaaataaacagccttgttgctcacacgaagcctgtttggtggtctcttcacacggacgtgcatgaaacttccttccttccttctttctttctttctttttttgacagtgtctcactctattgcccaggccggagtgcagtggcatgaccttggctcactgcaacctctgcctcctgagttcaagcaattctcatgcctcagccttcctagtagctgggattacaggcacctgccaccgtgcccagctaattttgtatttttagtagagatggggttttaccatgttggccaggctgctctcaaactcctgatctcaggcgatccgcttgcctcagcctcccaaagtgctgggattacagaccaccatggccagcctgcccccaaattcatatgttgaaatccttccccctaaggtgataagattaggagatggggcctttgggaggtgattagttcatgagggtagacccctcatgaatagtattagtgcccttattataaaagggatcccagagaactctcttgctttctctctaccatatgaagatataatgaaaagactgcagtctgttacccagaagagcactcatcagaacccagtcacgctggcaccttgatgttgaacttccagactccaaaactatgagaaataaatgtctgctgtttatcaaccaccctgtttatagtactttgttatagtagcctgaattgactaagacaattatggagcttgaaagaactgtgagctcctcttatggtcaaaggagctgaaacttaggctttgtcctgaaatttccctctttttttccccctgaatcattaattattaattttccctttctttgatcctcggttaaaaaaaaatcctctcttaaccctatattctgctccagctgtgtctcatttttctgttgtcctttatatcaaaactctccccaaagacttgttatgctttgtcttgacttcctctccttttatctctcttgaacctgcttcactcagacatctgacccaaaactccaccaaaatcgcccttgtcaaatccactaggcaatcttcagtcttcattttattggcaagtcaagagcatttcaaccattggatcactgcctgtttcctgaactgctttcttcacttggctttcatgatagctaatacagagtccaggtagatggcaagtgctttggtttgaaagtatcccctggaagatggagtgttgcaaacttcattgccactgtggtaatgttaaaaggtggggctttctcgaggtgattgggtcatgagggtggagccctcatggtggattaatgccattattgtgggtgtttggcccccttttcctttctgtctctctcacactcttcctctctcactctcaccctttctcacccttccatcttctgccctgccaagggacgactcttcagatgccagtaccacagtcttggacttaccagcttccaaaactgtgagacacaaatttcttttaaaagtaaattacccagtcttgagtattctaagacaaccactaatgactcctgcttccttttccattaagaagagctctttttggggtatagcagcaataggtcttgcatttcccaaacctgtttctccctaggtaggggtaacagaatttgaagtgaggtggttaagaagtgtcttctttactcttccccatctggctccaagtggatgcccagggtgactttggaagcctctgttagcctgggtacctgaataactgtgtggagcagagccccttgtggtgtgtcagatgaacttcagatgtacagcacagcatcagtttctcctgctcattgatgagcatctgcttcagtcttccttattggcaaaccagctgtctttgcttctcagtccacatagtaggcagcctacaaggtagctaactgtagcacctggggtcacatgtttcagccccaaaacatttaatgactgactgaattcctaattctcagaaaagaatctgcttggtccacataagttcaggtgtctacctctggtccaaccagctatgaccagggagatgtccctgaaatatcatcttggtggttggagatctgctctgtgaccttgtgcatcagaacatggggagaggtttcaggagagtttctgtgtgagtgggaaaactattaagtgcctactctacatcccaatatttcactgtttttccctttctctagccccatctcccatccctccacgctccaccccatccactctaaatactcttttactttcttgaatcctcttggtatgtcctgcaactccagtagtcttctctggtcaagtttgcatattttcctatattcagtgcctcagagtcagatcttggaatcctctgacatctccagaccacttgttttctgtccttgtataaagtcatcagctcctttgaggtctacatcatttggctatgcctttctctctcttctctttctgctatctaaccacctcccaggtatccattttcatgcatcaaatattttaccacctgtctcaaagtttcctcttcaatttcagctcctgttctcttccgggtgacttcagctttcacatggcaggtacatcccacaccttgcattctccatgttttgaacgcctctactttatgaccttcttgtcctctccattttagtctaccacatccatggccacacttaaactttattctcatctgaaattgtaccttggaaatcttgaacatcccagtctctaatgacaggtttctgattttgaaattcttgcccttggttcctctcgacagaactgttttcggttttgctctgctccactcttgatttctttccttacccactttagactccatgaactatcatttcaaccactctctttttcaataccctcagctccctttccccttcttccattttaccagctttgaaaatccccaaatctggatgaatacaagaagctgtcctcttcccaccaacccaaatatatgactttatagcagattttttgcctacttaataccccacagaggctctctaatgcctcaggataatgttccaatttaacatggcagcaaagctcctgaagacctggcctctatttatggctccaacttcgtccctcacttcgttttctccactccaactgtactgagctctctcctgtatcttccacacccaaatctctgcactggctttcatacctacctggaaatcttttctcccagctaatgctaagtcttccttcagttcttaacatacacataattttctccttagtctttctcctgaggtttctataactctttctcaaaaatctgcctttagtcgcagtctctgcatcatagagcttgtcacttttatgcaatggtttggttttttcatagactcttgaggaacaaagaggcacggtaccttgtctgttcatcatattcacatttccagcacagattctggatcaaagtaattttttttttcagggtctcactctatcacccaggctggagtgcagtggcgtgatctcagctccctctgccccccaggctccaccccctgggctcaagcgattctctctcctcagcctcctgagtagctgggattacaggcatgcaccacaacacccagctaatttttgtatttgtagtagagatggggttttgccatgctggccagattgttctcgaactcctgacttcaagtgatccactcaccttggcctcccaaagtgctgggattacaggtgtgaaccactgcacccagcccaaagtgagtctttttttttttttttttgagatggaatctcgctctattgcccaggctggagtgcaatggcatgatcttggctcactgcaacctctgcctcccaggttcaagcaattctcctgcctcagcctcccgagtagctgggattacaggcatgcaccaccatgcctggctaattttgtattttttgtagaggtggggtttctccatgttagccaggatggtcttgatctcctgacctcgtgatccacccaccttggcctcccagagtgctgggattacaggtgtgagccactgcgcctggcctccaaagtaagtcttaatgaatattacatagtattcaaatgaatgaatgggtgtagaaggtaggaagataaggttccctcaatgttttttaaagcaatatctgacattgaaaaaattgtacattattattttttattttctctttccttttttttttttttttttttttaatgcagtcttactctatcacccagcctggagtgcagtggtgtgatctcagctcactgcattctcaaccttccaggttcaagtgatcctcccacctcagcctcccaagtagctgggtctactggtgtgcaccatcatgcctggctaattttttttctttttgtctttttagaaacaggggtttcaccatgtggtccaggctggtctgaaactccagagctcaagtgatctgcctgcctcagcctcccaaagtgctgggattacaggcatgagccactgcacccggccattattttcttcttctttttttttttttgagacagaggttcgcttttgtcacccaggctggagtgcaatggtgcgatcttggctcactgcaacttctgcctcccaggtttaagcgaatctcctgcctcagcctcccaagtagctgggattacaggtgcttgtcaccatgcccagctaatttttgtatttttagtagagacggggtttcaccatgttggtcaggctgttgttgaactcctgatctccagtgatccgcctgcctcagcctcccaaagtgctgggattacaggcatgggccactgcacctggcccattattttcttaatatttatgttttgcttcctttcagtagaacagacacacaagaagtaattcttagaaaaatgctgatgagcacctggaggctctgatgtccacactagatgccttagaaaaaagaactatagccattgctattcccatcattgtgctgcacagaggaatgtaggtatccctgggctttacatgtaagggcaaacaggacgtgataaccctccaggatgtgtttgagaagggacatgtgccttgtggagccaagcactccttcctatgctccctccaacaagtttaagaaatatttatttatttatttattttttgagacggagtcttgctctgtcacccaggctggagtgcaatcgtacaatctcggctcagtgcaagctctgcctcccaggttaaattctcctgcctcagcctcccgagtagctgggattacaggtgcccaccaccacgcctggctaattttttgtattttttttagtagagatgggggtttcactatgttggccaggttggtctcgaactcctgacctcatgatccacccgcctcagcctcccaaagtgctgggattacaggcgtgagccaccgcacctggccttattgatttattaatttgttgagcacaggcgagttggacgctaagaatatcaacatagaaaaagcacagaacctgcttcatgggacttattgactagaaacagatgatcagatgagaaaataggcaattacaacatgatgtcatgtgctgtgatagaggtaagcacaggcttccatgggtgccaaggaggaatctctaacccagcctgcaatggtaagggaaagttccccagacgtaatggcaccagaacttagtcttgaaagaacaggaattacagaggagaagtggagatggttgagggcattcccatcaaaaacccagagagggccgaatgtggtggcacctatattttagggtatatcatatatgataagttgtaaagaaaagcaagagaatgattagcataaaatttagagtagcagcctcttttttttttttttttttttgtagagataagagtcttgctatgttatccaggctggtctcaaactcctggcttcaagtgatcctcctgccttggcctcccaaagtgctgggatcacaggtataagccattgcacctggcccagttactatttttaaagtaagaagttggtagaaaactggtacaacttaggacttccatttcctggtgacaattgtccttatcacctcataggtctttgaggaaggttagatgtgatcaacaatgatgtcctgttctgactaaacgttaattgtctagcttcagaggcagagcctgagttaggtccctttctctgtggtcatgagaacctgactcagtgacgttgactcacagaatgtgagcttcatcactagctcttatcaccttgggtctagagggtcagaaatggaagctctcctgcaaaggggggcattgagagttcaagtttctcactagtccaggcaggagtgggtacatgtttactgcagaacagagtaggtgtgacctggcataacagcctaggggtcttcaaagaaagctgggtcttatcttatctcgctagaggaaagccagtctgagtaagggggtggaagagcggtggaccatctagggatccaacaaagtcgcatttcaaagccggatgtgatgccaggcacagtggctcacgcctgttaatcccagcactttgggaggccaggatgagcagatcacttgaggtcaggagtttgagaccagcctgcccaacatggcaaaaccccatctctactaaaaatacaaaaattagccaggcatggtggctggtgcctgtaaccccagctacttgggagggtgaggcagaagaatcatttgaaccccagaagaagaggtgggggttgcagtgagccaagatcgcgccactgttctccagcctaggggacaaagtgagactttgtctcaaaaaataaataaataaaaaataaaaaagctgaatgtgttttggcagggtctaatcactcattcctctaagaggcatcagaggcccattatcaagacaggtggaaagtgctttgaaacatgtttaataaattacttatccagcacttagctagtccctgctacatgccaaggctctttacaaatattagcccgtgtaatcctcataacaaacctatgaggtgggtaatattattatcctcatttcaagaggaaggtatttgcctgaggggatacagtgaatatgggagatggaacgtgggcccagaagcccagctccagatccaggttcatcaccaccatgctgagctgcctggttggtctctagaagctctcacaatacctgtggctgacccacagctccagtttgcatgggcagagggaaaggattagcccagcttcctgggccagtgtgtaggtgctggcttgtctttgtagaatttaactattggctaggagccaatggcaggatttgcatgacccaaagaccagcccaaaatgaatgacgctggtggcctttgtgctaggaggactgtctcgccttcttagtacagactttctacaacagcgctggggacaaaatcacaggaaagtacaagaagcagggtggaaacgtgcattcaaatgataaactggctgaaggatctagtgagtctgctagaagagcaagggtcaagaacagcttgcagccttgaccatcgtgggcaagtctttccatgtcctcgcctgtgaaatgaaaagttacaccaggagttcccaagcatggctctgcctctgaattccctggagagagagaggaaaaaatataggcttctcatcccaacctgtgcaattctgacttatatagaaaactagacacaattctggagtagtttattccccaatgattctagattatcaagtttttagcatgtaggaggctcataagaaatatagagttctgcattactgtgaggtttggcttcatttcagaatttaaaagagcaggacacggtggctcacaactgtaatcccaacactttgggaggccaaggcaggcagatcgctagagttcaggagtttgaggccaacctgggcaatatatcataacctcgcctctactaaaaaaaattaaaaactagctgattttggtggctgacgcttatggtcccagctacccaagagactgaggtggaaggacggcttgagcctgggaggttgaggctgcaataagctgtgatctcaccactgcactctaacatgggcaacagagcaaggccctatctaaaaaaaaaaaagaaaaaagaaaaagaaaaagaattcctaccaaaatgccaaaaactccaatatgtataggagtcgacgtgacaaagttggttagggacaaataaaaacctagatcccccttctcttataaaaataaatgatttaaaattttattttttattttttgtatttttttgagacagagtcttgctctgtcgcccaggctggagtgcagtggtggaatctcggctcactgcaacctctgcctcctgggttccggtgattcccccgcctcagcctcccaagtagctgggatgcccctgccatcccatctggctaattttttttgtatttttagtagagacaggatttcaccatgttggccaggctggtcttgaactcctgacctcaggtgatccacctgccttggcttcccaaagtgctgggattacaggcatgagccactgtgcctggccctgatttaaaattttcaatgtgaaggaaaagcccttagagcagacaggatgccagacactgcatccccgtctttgaactctataacaactctgtgttatgttcagcctcttcccattgtataggtgaaaagtgaaattcggaaaaaatgactatttgctaatgatcgcaaagctcataaagttctgccagacactggatttatacatttccataaaagctatccatgtgttcattcaggtatttgcttatttgcaaataaataaatattcgtttattcagcaaatatttactgagtcctatgcttttcttaacactgagaacacaaaaatatacagactgcactatatacaagtataaggatatcacatgtaccccccaaatatagacaactattatttatcaatttaaaaaatttaggcagaataaaatattcatgccaaataataagtttagcctcttaatccatccttccttccctttcttgcttgctttcttgctttcttttatttctttttatttatttatttatttttgagacagtttcgctctgtcacccaggctggagtgcagtggcatgatctctgcttatgtaacctctgcctcccgggttcaagcaattctcctgtctcagcctcccaagtagctgggactacaggtgcccaccaccatgctcagctaatttttgtatttttaatagagacggggtttcatatattggccaggctggtgttaaactcctgaccttgtgatccacccacctcggcctcccaaagtgctgggattacaggtgtgagccacagtgctcggcctatttctttttttttgagacagggtctcactccattgcccaggctggagtgtagtggcgcatactctgctcactgcaacctccgcctcctgggctcaagcaatcctcccacctcagcctcctgagtagctgggactacaggcttgttccaccattcccggctaatttttgcattttttgtagagacagggtttctccatgttggccaggctggtctcaaactattggcctcaagcgatccacctgcctcagcctcccaaagtgctcggactacaggtgtgagccaccatgcctggctagctcatttcaaaatattcccagtctttccaaaattaggaagccctgaggggtatagaaaagatccaaactccccacaaattaactttgataaatccttgactgtctactactaataatcttatttttgctaagaacatcttttctcagtccacaaccagaaaacattcctttgacaacttttatggctattaatattgaaggaaatattgaaaaagagtcctagaataagtaaaattcagttttaagaaaaagagagaggcaattataacggacattcatgcttcataaaacttttcttttattattattattattattattattattactattattattatttttgcgacagagtcttgctctgtcgcccaggctgtaatgaaagcatcacaatcttggctcactgcaaactctacctgcagggttcaagtgatgatggtgcttcagcctcctaagtagctggaatttacaggtgtgtgcctccacgccaggctaatttttatgtttttagtagagacagggtttcactgtgttggccaggctggtctcgaactcctgacctcaagtgatccccctgcctccgcctcccaaagtgctgggattacgggcgtgagccactgtgcctgtccccagcacaaaaagttctgatagctccatgttcctttataatcttgaacgataatacataattttacaaaactgtcattagtgtgcatacaatttggtgatattttaaatgaaacacattttcaccagcagttttctaaggtgtggcagaatacgcaagtgttttgcttttgatactatacaatgttgttgggcacaatcacttaaaaaacatactgacccatgaagtttagctcttggagtttccttagagaatattcggaccaaatgtactattgtgtgcttgaggaagctgaagactagaacttgcccacacctcttgtggggctcattccctgcacactgcttctgaagagagcatgagagcctggtgagtttgacttccctgaactaggcctgaagctaaaggtatggtatggagacaaggtaaggaatttcagtggtgagagttccaggatcatccatgctgtggctctgcagctcttgctgcaaattcccagttcatttagataagaaaacaggagtggaacaggtgagatgtccacacagggtcaggatccatggcagaagcagaatatctttgtgcaccttttcctgggtgcccttcaaggtatgtaacagttgttagatgaagggagaagttcttcgttggtcaggaacttcattctctctaacctcaactgtatctgaagactctcaacatcatggaattgtagttagaggagatgttggaatcatggcgggaggagcaggtagctctgtggtttccaaaagccactgtagaggatcaatcagcaggtttggggtggagccccagaatctagagtctaactttcaaaagctctttaagtgattctgatgagaaactggttaggaaaacagtgaagtagaccaccctctcacctaggcagggagtcacttccattcagtggaaagcccatgaggatgtgaggaggacttaaatatttccaatgacagagaactcaagtttctgaaacttactcccagtgggaattcccccaccccatatgaaaaaaaaaaaatttcctttcattccagtttatctatggccagtagttgtttgaaaggaatttatacctctgcaaagaagtcactaaaaactgtcttacaaatactaaaatctactccttgaatcaatttagcaaaatgctttgacctgataactccatttttgggatattatcctaaggaaataatcaaaaatatttttaaaaagaaatcctttatgaacagttttgtttattgcaccattattcatactagagcaaagaacaacaatgacagctcaattagagacctgttaggtaattggagaatggttaaataatctttggcatgtcaactcaatgaaatattgtgtgaccacttaaaaggatttgacagagtttgaaactatgtgaaaaattgcttctgttaccctaagtgagccatgattgcatcactgcactccatcctgagtggcagagcaagaccctgtttcaaaaaataaataaataaaataaaatacaataattaaaaagcaagacataaatttgagaccaggtccagtggctcacacctgcaatcccagcactttgggagctgaggtaggaggatcatttgaggccaggagttcaagaccagcctgggaaacatactaagaccccctcaccgtctctatttaaaaaaaaaaaaaaaacaaaaaaaaaaacgggtgtggtggtttatgcctatagtcccagctactcaggaggctgagatgggaggattgcttgagaccaagagttacaggttacagtgagctctggttgcaccactgcactccagcctgggtgacaaagtgagactctgtctcataaagaaactttaaaaatcaccaagatgatgagactttaatagaactttagagtattccatttagaaatgatgtcctagctgggcacagtggctcacgcctataatcccagcactttgggaggcagaggcgggcagatccagaggtcaggagtttgataccagcctggccaacatggtgaaaccccatctctactaaaaatacaaaaattagcagggcatggtggcacacgcctataatcccagctactcaagaggctgaggcaggagtattgcttgaacctgggaggcagaggttgcagtgagccgagatcgcgccactgcactccatcctgggcgacagagtgagactctgtttcaaaaaaaaaaaacaaaaaaccagaaatgatgtcctagacaatacatgtacactgagatgagaaaatcatgaaaatgccaaagtgttagaagagaagataatctagatcagtggatcctgatttgactgcccattggaattacctggtgagtggttataaatcttgatgcctggccacacctaaacaatcaaatccatagaaatttttaaataaaaaaaaaatttgaacaaaacatatgatagaaattttgtaaaataaatacaactccataaaggaaggaagttcttccttcctttctttcaatttctttcctttgaaaagaaatcaaaatataaaagtggttgatttgaatgacagggatgtaggcaattaatttttatcttcaagggcttttttcccaagtttatttgctaaccattgctcagataataaaaattatataacaagcagttaataaaatgtttcattggctcagtattgccatgtagaaaaattccaactttaataaaatataccttaatttattatttaattaagggtgtggtatgagcccttccagtgaccagcttccgctgaaactcacatcctaccctctcaaccttgctgatctgctctctgtgctttcttgctcctctcgtttcttttgttttgttttgtgtgttttgttgttgttgttgttgttgttttgcttgtttttttttttttttttttgagacagagtctcgctctgttgcccaggctggagtgcagtggtgccatctcagctcactgcaacctccgcctcccgggttaagcaactcttgtgcctcagcctcccgagtagctgagactataggcacctgccatgacacccagctaatttaaaaaatatctttagtaaagacaagattttgccatgttggccaggctggtctcgaactcctggcctcaagtgatccacctgcctcggcctctcaaagtgctgggattacaggtgtgagcccccatgcctggccaggaacattgttaaaagcccagcttacagagcccaggatcacagagccagcctaagattgaagctagaccagggcaacagagaaccccttcctaacccccaccatgagcctaacagcatgtaccaagcaataatagtctacaactaggggaaggacaaaggcaagcagaaaggtcctctctgtggctcagttggcagagatagctacaagatgaaggtggggcaagaatatcccctcacctcccacctgaatcacaacacaagcgaggagaatttgaagctggtttgtgcactgaaggaaaccatagcaacaacaaacccaaacctactcaactcctgactagactgattcaaccctccacattaatgacctgtcataaaaggtgtgcccatttcagacataaataccacttacttcagtgtctactgtcctacaaatgatgccaggtattcaatacaaagttatgacatatcaaggaaacattaaaaacaaaaagcaacaaacaaaatcccaagagataaagcaatcaatagcaagagattgatctatgagcaacattttgaaactatcaagcaaggaattaaaaataattaggattaatggattaaaatatctgataattaaaaatgaacaacaaacatgaaccgatgggtaatttcagcaaagagatggaaattataagaaagtcaagaaggaacatcttcaaaacagcaaacaaggaactccaaaaattcactactccattaaagcaatgagaacattgtcaaaataaacttttacaactgtgaaaattaactaaaggcttgcaacatgctgagaactgaaaatattgagaagcacttatttaagaaaaatggctgaggctgggtgcgatggctcacgcctgtaatcccagcagtttgggaggccaaggtaggtggtttacttgaggccaggagtttaagaccagcttggccaacatggtgaaactcagtctctactaaaaatacaaaaaagaaagagaaggaaggaaggaaagaaggaaggaaggaagggagggaagagagagagaaagaaagaaagagagaaagagagagagaaagaaagaaaagaaaagaaaggaaaagaaaagaaaagaaaaaagaaaagaaaagaatagtcgggcatggtggtgcactcctataatcccagctacttgggtggctgaggcaggagaatagcttgaacctgggaggtgcaggttgcagggactcgagatcacatcactgcactcagtgcaatgagatgtctgttttggtaccagtctgtgcactacacaaggcaatgagatgacattcaaaatgttaaaagaaagattgtcaaccaagaattctatatcagcaaaccttcaaaaaacaaaggagtaattaagacatttacagatgaacaaaaactgagagaagtcatctttagcagacttgccctacaagaaattctgaaaggaatccttcagcataaaatgagagaaccctacatgttaaatccacatgaagaaataaaaagtatggtaaaggtaactacataggtaaatgtaaaagacagcagaaaagtgtttttatttgtaacccctttcttttcctctcttatttaaaagacaactgcatacagtaataattataaaactatgttgatttgtaatgattatgaaccaactataaaccaactatgttggtttataatgtatagttagtatgacaaaaatcgcacaaaagtggtatgagagaatgaagttatattgcagcaaaatgtttgtatactgttgaaattaagttggtattaatccaaactatattattttaaattaatatattaattgtattccacagggaaaccaccaaaacaataactaaaaacatatagtaaaagaaacaaagggattaaaattgtatactagataatagccattaaacaaaagaaagcagtaatgtaggaataggaaataaaaaatatataagacatagaaaaagaatagcaaaatggcacacaaatttaagaatgaaagactaaacgttttccccttaagactaggaataacaccaggatgtccactctcaacacttctatttaacattgtactgaagtttctagtcagggcatttggtcaagaaaaataaataaaggaacctagattacaaaggaaataaaatgatctctatttacagataataagattttgtatatagaaaatcctaagaaacctaaaaaagaacttattagaactaataaacagttaagcagggttacaagatacagggtcaatacacaaaaagaaaatatattgctatacattaataataaataactcaaaaaaataaaactaaggaaacaatttaatttacaatagcatcaaaaaagaataatatacttagtgataaatttaacaaaagaagtgcataacttggacattgaaaactgtaacacgtcatagaaagaaattaaagaaggcctaaataaatggaaagaaacccatatttgtggattgaaagactcaatattgttaagacggcaatcctccctaaattgatctacagattcaatgcaatgcctttcaaaattccagttggctgtttttttcttttccttgcagaaaatgacaagctgagtctaagattcatatgaaaatgtgatatggttaggctttgtgtccccacccaaatcttatcttgaattgtaatccccataatccccacgtgtcaagggagagaccaggtggcagtaactgaatcatgggagtggcttctcccctgctattcttgtgatagtgaatgagttctcacaagatttgatggttttataatgagctcttcccccttcactcagcacttctccttgctgctgctttgtgaagatgtcttgcttcccctttgcctcatgccattattatgagtttcttgaggcctccccagccatgcagaactgtgagtcaatgaaaactccttcctttgtatgggttcatgtcctttgtagggaaatggatgaagctggaaaccatcattctcagcaaactatagcaaggacaaaaaaccaaacaccgcatgttctcactcataggtgggaattgaacaatgagaactcttggacacaggaaggggaacatcacacaccagggcctgtcatgaggtggggagagtggggagggatagcattaggagatatacctaatgtaaatgacgagttaatgggtgcagcacaccaacatggcacatgtatacatatgtaacaaacctgcacgttgtgcacatgtaccctagaacttaaagtatataaaaaaaaacaaaaaacctctttcctttgtaaattacccagtccccagtctcaggcagttcttcgtagcagtgtgaaaatggactaataaaaaatgcaaaggatccagaatagccaaagcaatcttgaaaaagaaacaaagttggaaaactcacaccttcagatttcaaagcttacaaagttacagttatcaagacagtgtggtactagcataaggataggcatatgggtcaatggaatagagttgagaattcataagcaaattcatatttatttatttattgagatggagtttcattcttgtcacccaggctggagtgcaatggtgtgatctcagctcactgcaacctctgcctcccaggttcaagctattctcctgcctcagcctcccaggtagctgggattacagggacccacgaccaagcctggctaattgttgtatttttagtagaaacagagtttcaccatgttggccaggctggtttcaaactcctgacttcaggtgatccacctgccttggcctcccaaagtgctgggattacaggtgagagccagcatgcctggccaaattcatacatttatgaatttgatttgtaccaagacaatccagtgggaaaagaataggcttttaacaaatggtgttgggacaactggctatccacatgcaaaaagaatcaagttggacttcttccttatgccattttaaataaactcaaaatgaagcatagacctaaataaaagagctgaaactacaaaaccttttgaagaaaacaggtatgaatatttgtaaccttgaattaggtaattgcttcttagctatgacacctgaagcataagcaaccatggaaaaagaaggactgctagtttattttctcattgatttgtgggggggtccatgtatctagggaaacaatccttttctcagttttaggaattgcaaatatcttcgaccgttctgttatctctcattaattttgtccatgattatccttttttgatcttaaatatttatctttgccttgtggcttatgctcttaaagttttgctaaaagtgtcttttttcatccttaggtgacaaatatatttttctatatttccttctgttaagttggcggttttatctttcatgttcaagccaataatccatctaaaatccaccttttcatgtattttcatttagggatccagattcatttttctccatacagtgaatttgtttccctcaaagtgtataccatataatcatttccccattgttgtatggacccctctttatcataaattaagtttcaatatgtaaataggtctattcctgagttcctatactgttccatagatctatgtttgttcttacaacaatattttaaaaaaattaataaggctattagaaaagtaggactagaaggacattttctttttctttttttaattttatttatttatttatttatttattttgagatggagtctcgctctgtcgcccaggctggagtgaagtggagtgatctcggcctactgcaacctccacctcccagggtcaagcaattatctgcctcagcctcccgagtagctggacttacaggcatgcaccaccaaacctggctaatttttttgtactattagtagagatggggtttcaccatgttttccaggttggtctcgaactcctgacttcaggtgatccacccgtctcggtcttgcaaagtgttgggattacagacgtgagtcattgttcccggccagctacacttatttcaaaacaaaaaaggtagctttttttaagtccatgagcagcagaatcaatatcaagtagaatggtgacagcctgcccttcaagacatatttatttattcttgctagaaatgagtatataagttgctatggtgatggttgtcaactggaccacagagctggactggaccttcaatggggtgaaaagtaggtaacccctgctgcctgtgagaggtaagacatccagcatctcatcaaactgatgctaaagaaagattttctgctccctgtaacataaaaggattttactgcatgggtatatcagtaagtgcatttaggtcaacaaacagttctactcaacaaccacacaatatgtagagcttgctcaagcaaattgtgtgataaccatgtgcttttatagacaatgtaagtcattgctacatattatttgtaatgattgttggcttgtttagtgcggttccaggtcttttaatcccttcacatatgaccccaaatttgagaagtctgtcagatatccaagtggtgatatctggtggacagtaggatgtcagtctggtgcttgccagagaggaaactatgagtttgaccgtggtcaattctatatcttcctgggactggaagagatcacttagaggaggagtgtggatatagagaaggagaaggatgaagacaaaagtcctcaagaacatcaatatttagaggttgaggagccaaagaggaattagtcaaggaaaaaaggccagtgtggtgggaggagagtcacagggcctgaaagtgttttgagaatgaaggagaactcaagtgtgtctatcgctgctggcagatctagttaggtgaagatggagaactgtctttgacatgggtcaccctgtagtatgataataactctaagaagtgccattttgattgaatggtggacactgcaaaagctcagttggagagggttcaagagcccatgggaggtggaaagtgggcaggcaaaagagggagtggctggagtgaatcaagagagaatactttttaaagacatatgaaatcaaatcatgtttatttgccaatgggaataatttggttgaggggacaatcaatatggcatgaatgaaggggatatttgcaagggcagagttcttgagagcagaaggagattgaaactcaaagcacaagtggaggagtggccttcatccctaccaagagagaaggtggattttgcaggtacaagcccaggtaaggtgatagatgcgatggtagggatggaatggttcttttttgactgtccacctttctatgatatattgggcaatgctgttggctgagatgggtggtggggggggcaggtgagggtgataaacatgattagatttcatatgtctttaaggaagtgtggaataagcatcccagaaagtaagaggggaatgttttcaggaattgtaagtggagtgacagacattcctaggtgtcatgtgagagttgtggtcataattttgaagtaaaccaagttggattggtttgtatgattttttaaaagtattcatctgtttaggtgtgggtagagtcaagaaacagtagagctagatcagggtttggtgtttcctaggtgtatcaattaggatgtttttcattgtgagtaacagaaaacctctctcaagccaccttcaacaataagaaaatgaattattgaacttaaaagaaggttcagacgtaggtcaagctccagggttgttgattcagtggccccgtgagttcatcaaggactcaggttctttttccctctacttggctgtctatggaattggctgcttctcgtggcttgcaccctgctcttgtgatgcagtggctgggggcagtcagtctacctctacccgcttcctcattcatgtggagcaaaagagagggaaaccctctcatgctctcaccagccagggaagacagggcatttccttcaggcattaacagttaccatgggaatgccatgtgctggtggcttcagtctggtcctcctgaatcagtcattggcaagcaccaagggatttctaggatggatttagaccagtggttctcaaagtgtgatttttggaccggcagcatccgcctcacctgggaacttgtttgtttaaaattcaaattcttgggcctcactctagatctattatatcagaaattctggggggtggggccctacagtcagtattttaacaagccccccaagcaattctgatgcacggcaaagcttgagaactaatggcttaggataagacagtgaatgccatgaacaaaatgagggatctttgaggaaggaggatatggcaataaacatctactagtggctactagaccaggtgggcacctgagagaaggctcacagagttcagggtgcctgcgatgcagacattctagggaagggctccaaaacaagggttagaagaaaaatgaagacacagaggaacaatggatccggtaaaagtggtgaaattagtagactggtgatcacaatgaagctggagaattgcaatgagttagcaggatagaagacgtgatggccacacagatgaactcacagaactccaactgcatgtctgaaccaaggtcacactgactattcactgctctcagccaacaaatgagggtggcaagaatgctaaggcctaagcttcattcagggccacacgctcttcagatggttgactttggctcaaggaccaccaccaactccccatcacctgactttggtgagccttctttagactgcatgttctgtttctttgtttgtttgtttttggaaacagagtctcactctgtcacccagactgaagtgcagtggcatgatctctgctcactacaacctctacctcccagcttcaagcaattcttctgcctcagcctcctgctgggattacaggcatcctccaccacaccaagttacattttgtatttttagtagagatggggtttcaccatgttggccaggctggtctcaaactcctgacctcaggtgatctgcctcccaaagtgctggattacaggtgtgagcccccatgcccggccctgcatggtgttctaagaatcttccatccaaccttctctctcattctccttcactcatggttagacttgtatcacagttcagcagcactgccatatttacccaactccgtccctaatttttttctcacagaggcacttccccttttaatatttttggcatctgcttcttgggagaatgtagactaatatggaagtttcctgagtagagtttgaaaatgagattgtgtgtcaggtactgtgctatgcatggagtatggtagggtggtctctgccttgctagagcaccactgaggaatacagatgtataaccagtcactgcaggacagcatagtaaggcatcatggggcagtcccagctgctggagttgacgtgggcatgcttagggatggtggaaagatgatgatactgttggtagggtggatatcctgccaactgatagcacacccattagtttagggaaagacctggtgttcagttgctagcctctcaaagagttgtccccacaaacacgtgtgtaagtatagctcaatgactacactgaaaggatatagtctcaatgaatgtcattggttcctacaggcatgataagacaatttctatcattattcctgatatggtttggctgtgtccccacccaaatctccaactgtagctcccataatccccacgtgtcacaggagggacccagtgggaggtaattgaatcatgagggcagttttttcccatgctgttctcatgatagtgaataagtctcatgagatctgatggttttataaagggaagtttccctgcacatgctctctcttttgcctgccaccatgtaagatgtgactttgctcctttcccttccaccatgattgtgagggctcgtcaaccacatggaactgtgagcccattaaacctctttttctttataaattacgcagtctcaggtatatctttattagcagcatgagaacagactgatacaatttcctttcccatggccttcagaaaatagatggatgacttcacggatgttgaggagagaggcaaatactttataacggtttgctttttgtgacaaagtctttgttttctgcctgcctttctctaacatttcccctagtgactgtcaacccacaatgagtggttctttccctactgactgcactaggtagttgtgagggaccatgagataaagccccaagctcccttaacaacagtaagctgctctcccatgcagagtccttattccatctccaactcaggcctggctacaggcacctgaggaaaggagtgtgctccagtctcctgggctccacacacttccattctgaagggaatgttgggtcccttttggatttttatcctgaaattcaagatccatgaatggattcgagggaggctaaatctcctggaattatgtgtacatttcttcacacaatttttttgtatacaatttgcaacacagtttttttttgtcatttttgtatgtttatgacatgttaggggcataaaaagggatggggtccatagttttttattatttctcaagtttgtgacctcaaaaaatattgagtcagtctttttttttttttttcagatgagtcttgctctgttgcccaggctggagtgcagtggcacaaccttggttcactgcaacctctgcctgctgggttcaagcaattctcctgcctcagcctcctgagtacctggcattacaggcacccaccaccattcccggctaattttttttgtatttttagtagagacagggtttcactgtgttggtcagactggttttgaactcctgacctcaagtgatccacccacctcggcctcccaaagtgctaggattacagatgtgagccaccccacccggcccagtcactttttttttttaagagaaaaatactcaagcctttatagggtgtctagatgaaaaactgcctttaaagggtatctgttgttgtagttatccattttaattttaatattattattctactttattttatattttagtttagacaggggcacactctgtcacccaggctggagtgcagtggtgccatcatggctcactgcagcctcaacctcccaggcagaagtgatcctcccatatcagcctcccaagtagctgggaccacaggtgtacaccatcatgcccagctaatttttaaattattttctgtagagatggaatctccctatgtttcccaggctggtacgcctccattttagattaaaagaaaggtccctttttctttgtggtgatataagaaatactgtattatggaattttgtgggataataataaaagggggctggtatatggaacaaaaggaaattaattttgtaccttaataaatctatgtcataagagaattttaacctccatagaacactgtcttggaaaccgaaaactaaaaagaagaaaaacatcataatttttcttttttaaaaattctcttttctttctttgttctttttttccttccttcctcactccctccctctctctttctttctggttaatcttaggcctagttatttccagattaacaggcaaaagtcttcattagagttatagttacaacatgaaaattacaggacaaacttaactgtgttacaaaaatgccaaacgcagatggaagtgtgcaattcttgtctgtctgaactttccctcattcaccacgagagggagcgccacaccacagggacagctcccttcactgcctgcatagctgtcttaatggtctgctatgtcgtgaacattttgcaacgtatgcacagaggtcagcaaaatcatggaagaacagggccttgctgattggtatacatgtcatgaggggccccagcagacctcagctctgtgttcaggtcaagaagctgcaggtgacccgagacacagcagctcctaaccacgccctgatgtgcagcctgcgtgctgctgcggggcaggtcctgaggcctccatcaactcatcttttctagaatgacaaagtgaaactcagttccttcctctacaggtgacaaagcaggtagagtaatcgatgagctaataagtgagtagacatgctaaagcatttatgagatctattatgatctcctgtgaatgataggaaagatgctatagatgagaagctgacatcaggttcagttatttttattcacaattttctatcaccagctctgtgctggtgattgtatttgaagtgtatggtctcaggtattgatgacagctggagggagatccttggaggctggccttcaggctcttttggtttttattgtttttaattgtggtcaaatatacataaaaataaccccttttaaacgtgcagctctgtggcactgtgtacattcacgttattgtgcaaccatcactacagtttatctacaaacccttttcatcttctcagatggaaacacggtacccataaaccaacaactccccattctcctctcctcccagtccttggtaacttctgttctactttgtgtctctgactctatgaatttaccttttctattctaggtaccccttataaagggaatcatgcaatatttgtctttttaaatctgggggatttcactcagcatgtcttcaagattcatccatgtggcatatatcaaaatgtcactcctaaatgtggtatatatgtaaggagttattatttatattgtatatattccacacaatgggatattagccataaaaaaaagaaatcctgtcctttgcagccacattgaaggaactggaggtcattatgttcagtgaaataagccaagcacagaaaagcaagtgtggcatgttcttacacatatatgggaactaaaaatcctggatgtcataaagacagagagtagattggtggttaccaaatgctggaaagagtaggagaaagatggggatgaagagaagttgattaattggtacgaatgtttagttaaatagaagaagtaaggcttagtgttcaatagagcagtagggtgatgatacttaacaataatctgttgtatatttcaaaatagctgtaagagaataattcaagtgttcctagcataaagaaaagataaggcctgttgcagtggctcacgcctgtaatcccagcactttgggaggccgaggcaggcagatcacgaggtcaagagatcgaggccatcctggctaacacggtgaaaccccgtctctactaaaaatacaaaaaaattagctgggcctggtggccggtgcctgtagtcccagctactcgggaggctgaggtagaagaatggcatgaacccgggaggtggagcttgcagtgagccaagattgccactgcactccagcctaggtgacagaacgagactccatctcaaaaaaaaaaaaaaaaaaaaagaaaagataaatatttaaagtggtgaatgtgccaattaccctgatttgatctttacacattatatgactgcatataatgtgtatatataatatataatgtatatagacatgtactccaaaaatatgtacatctattatgtatccataaacttaaaaaaaagtctctgttgtttaagcaaaaaaaaaaaatggttgttcatttttaaggcgaatagtattccactgtatgtatgtcttaatgtgtttagtgttataacagaatacctgattctgggtaatttattctaaaaagaggtttatttagctcatagttctacagatcaggaagttcaagggcatggtgctgatttttggtgatggcttccatgctgtgttataacatggcagaaggtcaaagcgggagcaggtgtgttcaatatcacaagagcagtgatatcactttataagaactcccaggccgggcacagtggctcacgcctgtaatctcagcactttgcgaggctgaagcatgaggtcaggagttcaagagcagcctggccaatatggtgaaaccctatctctactaaaaatacaaaaaaacaaaaattagccaggcatggtggcacacacctgtagtcccagctattcaggaggctaaggcaggaggatcgcttggaggttgcagtgagccgagatcgcaccattgcactccagcctaggtgacagagcaagactccatctaaaaaaaaaaaaaaaaaaaagaactcccacttccaggagctaatccattcctgagcaggtgagagctctctctcatacctgtgagtgagacaacattaatctattcgtgacgatggggacccatgaaccaaacacctcccactaggctccacctcccaacactgccatgttgggaatcaaatttcaacatgagttttaggtagggataaatcacatcaaaatcatagcagtatacaccacattttgtttatccattcattctttgatggacatttgggttgcttctggcttttggctattgtgagtaatgctgcaaagaatattaatatacaaatatctgttccagtccctgctttcaattcttttgggtgtatacccagaaatatagcacctgataattctgtgttgaatttttttgagaaactaccatactgttttcctcagtgactgcaccattctgcattcccactagcaatgcacaagggttctaatttttccacatccttgccaacacttattgttttcttattttctctttttcagaatagccatcctactgggtgtgaaatagccatcctaatgggtgtgatttgtcttgttcaacagttttatcagtgatttagatggaaacaaagaaaagttgcttatctgatttgttgagcaaaggaaggtagaagccgatgtgttatatgacagaactgtgaaccaaaataaagttgctcacttacacaggggttgacaaactatagcctatgggagaatctggctcgctgcctgtttttataaacgaagttttattggaacatatctaccttcatttgttcatggatgtctatggctgctttgcgctgtaatggaagaattggttacttgagacagagactgcatgacctataaagcctaaaacatttattatttggcccttttcagaaaaagtttgttgacttctggattatatgtcttttaaaattctatttatttattttttattttattttattttatttatctatttgagatggagtctcgctctgttacccaggctggagtgcagtggcacgatctcagctcactgccacctctgcctcccaggttcaagcaattctcctgcctcagcctcccaagtagatgagactacaggtcaccaccacgcctacctaatttttgtatttttagtagaaacggggtttcaccatgttggccaggctggtctctaactcctgacctcaggtgatccacccatctcggcctcccaaagtgctagaattacaggcatgagccaacatgctcagtctgggttatatgaaagagacaaatttaaccagaaaatatttaatctctataagtataaaatatttgtatgtaagtaattaaaacaacaaagaattgggaactagctgggcgcagtggctcacgcctataatcgtagcattttggaaggctgagggaggaggattgcttgagctcagaagtttgagaccagcctgggcaacgtattgagacctcatctctaaaaaaaaaaaagagagtcaatggctttctatcatgtaaaaagagacatggtgttttgttttgttttttaacagtagactaaatatgactcaatattgactttagtgttgattgtaattttataccacattaacaggaataagcatctataacagtgattctcaactttggctgcacatggaaatcacctagaagatttaaaaatactgatgtcaaatccctggggaatctgatgtaaacgggctgggtgtggcctgggtatcagagattttaaagcttctcaagtgattcagtgtgcagttgtgacattccccctctgctggactcaggcccagtctcacctacagcttcattccatatgtcccattttatttattttttatttttattttttgagacagggtctcacactgttgcccaggctggagtgcagtggtgcaatcatagctcactatagccttgacttccagggcccacacctcagcctcccgagtagctgagaccacaggtgtgcgccaccatgcctggctaatttttttgaatttttgtagagatgagatctcactatgttgcccaagctgatcttgaactcctggtctcgagcaaccctcttgccttggtttcccaaagtgctgggattataggcgtgaaccaccatgcatggctgtgtcccattttaaaggaaataaagacaagctggttccttttcaaggaggaggagtcagaattgttgggggggaaaaaacaggaattcatttttataagaggaacaattgcagaaagtacaagtgtgaggatcctggagtgagatgtttctagctggcattctgcgtttgagggctgcctcatagaagaggggcctgactgcttttgtatgacatgacccaaggatacaagctgggagcggggagtagaactgccccgctattattatgacttttctttgaaaacagtacgatccaaagagggatagtgccagagggtccacccatcccccagatcaccaacaggggtaccatggagcaggtccgggagtggaacacctgatagtaatggtcaagatagcccaatcccaatggtgcgtatctattggtgctttctcatgccaggcaccatgcccagacactgcgttttctgacttgtgagttcacaccatttccacggggagggggctatgatttttccaggtcatatttgaggaagcagaggttctgaggcttgtcctggttcatgtgtggtggcagagctaggacccatttgcaagaattaaatctgtccacagagaatgcatattgccaacactgagggatttatgaagaaggaacttttgcttccaaattgtttgatgaatggttttccagcctgggctcctctgattctagaaaatacaatgtgtaaataactgaaaatatgaggctgagttttcacaaaaatgaggttgtattgaaaccaaatcctccagcagtgacctatgcagatgagaggtgggattcaaagcagtctccttagaaaacttgatccttagaatctggcatgtcagggctccaaggaaggcaagggatgatctagtccacacccatctcccaatttacagatgaagaaacaagtccagaaagggtctggagacttgtcctggactacgtatttaatatttagaaaatggtgttcttccttttgctgccttaatcaaacagtcctacccttactcaaaacagtgctggggctcggctcatctcagagtccatgcggcaggaaccggagagaatcaatcccttcacttagtggtacattttgactttgattcaaaacaacattactgagcactccgcactcgtttcatgttccagtcttaactctgaatgacttgtgactatctgcaacaattaaatcagcccagaaagaatgcagattgtcaccactgagggattgacaaagaaagaacttttgcttccaaattgcttgaaaagtaatttccaaagaagagttgccaaggagctgttgtgcacatcagtgtcacggacagggcattcctgcccaccagcccagggcaacttcactggagagtccagcaggccctgctgggtgcattctggtatgcgtgccacaaatcagccactgaatagctttcacagaagctgccccccaagagagaagctctcctctgggaagaagctgccaggctggggtgacatttctcagcaccccacccccatctacccactcagatcttgcatctaggtttccagcagtgtaaccaatgagtagaagggctgcacgtgacttctggggcaaaggtaagtaggagaaaggtgcaccttctcttctcctgctcatttcccatcaaggagctgcatgcaaatacctcctatgccccagggagcgagtgccacaagagggaaagaacctgggtcagaaccagttttatactttagctgaacaagaaataaacttttatctcttaaacctttgaactatggaggttttacagcaggtagcatagccctaatgtggccgcccaagtcagattttaccaaaacctaaacagagacacaggctaacatggtgcctgctacactaacagcattcaataaatgtgttggtgagtaaataaatgaatctcaaggatgtgattaatggtttatttagtcaaaaggaagttaaagaatgctaataaatgacttttcggttgcagagtgtattttgctacatgctgacccctggttttcccagctgcactcaggaataaatgaggggaaattaattgtaatttctatgaagagacagccacacccaggaatggatttctgaatcaaataaggtcattttaatgcatggagagctcagaaaacagagtaaggagctcctctattaggtgaatttagggttctttgctggcttgtgggtgtggacatagagccatgtccatatactgtgtcattgccttgaaatgctgtctcctgtacatcagagctggaagtggtcatacagcacctggcctgttcttcatgtcacagatgagtatgccaaagcctgggaaatggacaactcgcccagggtcccttggtcatcagcaggcccacactctaggcaggatggtgtggattaagggtggggacagtggaacccagttgctaagctggatttttttctaggtcactttgcaagccaggggtcttcagccagtgacacaccacttgggcctcactcaaccacgctacctgctacaggagatgggaccatctccagatgggaccacccatttggcccacctgggctgagtgtggcttgcacactggttcccaagttcctgtcccatgcccaagaagaatgaggatgcactgacaattaaaaagagagcaaagtggggagttttattgagtgatgaaacagctttcagcagaaaggggatgtgggagtggtccccctacccaaaggcaggaatgtcccccctaatatggctaagtctggggcttttatgggttcagaataggggaagggcaggctgtaggtagtattgaaaaaggcaatattcgattggttaaaagtcatcattcagaaagaataaattgggaaagggtgggcaaacaggaacagaagttctcactctgggacgtgggtttcatccagtctttcaaccttcaggctgtttttggcttgaaggtggggtttcaccggggaccctcccctatctgccaaggcatttggctgcctcctgtcactgtcagttgcctggaatcaaatcctatctctgcttcttgcaaattacttaactcccctacacttgtttccttacctttaaaatggggataattggaatagttcctacttcatggccatgtcatgaagattaaatgagttaatatatttaaggtgctcaggatgggacctggtgtgtaataagtaccatgtaagtgttagtggttgtggttacattatagtgattattattaatgaattcaaattgcccctttcctgtgtcaccgttcttaagcttcagaataaagatattaaacatcatagaaaatggaaagccacagtgaatcagaggatgccaggaactcttataccaagttgtcagaacacacagcctaagaaaccagaatttgttataaaataaagtgtgaattgatatttggcacacatggagttattcattaagagtagagaattcaggccttattcatgtctcaggaatgggctaaggacagtataagtgcaccattgttcttaactgtagaaaggaaaagaaaatatgagtgtaaaattaatcctggatgagagagaatggaatatgagaagcagcccagaaaacaaacatggtcagatattgcttttctctggtaagattccaaagacattgattgttgtggatttaatattacaaagaagtttatcaggtttggggaatcctagaatgtcaggcttttagagaactgcctagaactcaagagggcttcattgaaccaagcacatatatcctctcaagttctcctgccccaaccttcattcgatggcagatctccttaatatatccacagcagatggttggctgacttgtgcttggatgctctcctaatgggaggctcagggcaccacgggccacccactggttaccagacagctctaactgttagagaattctttcctagactgggccagtaatctgctttactgaatattggccgattatccctacatttatcttttggtgtaaaagaaaataaatcttgctttctccttcttgatggtggagactggcattagaacttctggtagattgctggtcctgacattaactgagctatgagacctcaaacaagttgcttaagctctcaatgccttgccttgctttactttaccttattttcataagaggcttgtgaaggttcaggtgaataagcatgatgtagataaaacatggaggagaaagcctgttactatttatccaatagatgatggttaaaattatcactatgtgaattcagctcttgggactcccaaagccttctctaagctaaatatcccatttcctctatgatatggtttggctgtgtccccacccaaatctcactttgaactgtagttcccacaattcctacatctcatgggagggacccagtgggaggtaattgaatcatgggggcaggtctttcccttattgttctcatgatagtgaataagtctcacgagatctgatggttttataaagaggaattcccctgcacatggtctattgcctgccaccatgtaagacatgactctgctcctcattcaccttccaccatgattatgaggactccccagccacgtggaactgtgagtcaattaaacctctttcctttatagattacccagtctcgggtatgtctttattgtgagaacagactaatgcactccagctgttcctacctggcctggtggccaacccccaccccattctggttgctctcttggattgcttaattgaaggtttcacttctccctccacttgtcccatcatcatcagtccttgtccaataaaaagagaccctcaatgaagggggactcaagtcagaacaggtgcagctggctcctgaaggagtgaaaagattctaactttaggggctgagacattctagtggggaggaggcctttggggtgccccaggaagaagtcaggtcaaggcatgaacccacaggtggctgctccagggttgtggtgtgtgggcagagagaaagctaaaggggagatttcagcttttctcccagaatgttcaagccatctccaaggagcaagaaaccagtcaggattcagtgaagatctgtccacaaataagaaactatgacattggaaggtacttgctttatcttgtgaccctcaagtccctgagctcagttaacggggtgcaagaggtagcctcttgctaaattaggtttatttatcacccttgatctgggcactgcaatatcacaaaaactgcctaaattcatgccccattagtaacatgctaatgatgttattactcacttactgagtttgtggtcgctaaaacctttagatttttttttcatgagaaccacctgcaaagttttttccatgctgcatgtgtatagctgactttggaaatcaaatagggaaatttataagctgccagcacagtgtctagcttgttgtaagcactaaaagaatggtagctattttattagcagtagtggtattaatattatccttgttaggtttcatttccctggtttcagcagctttgctcattgaggttattttgagtaccaattctgtttctctctctctctccccacccccctctctcctcccagcctccagctaggctccagtttgaccagggtgctatctgagtctatcttggggcttaacttaatgatagaatctgatacagcctgagacacagagcatgcacaattagaagcagtgctaccacttcactccttcttttcatccagaaacagatccctcatcaatgtccaaaattttacaatgagaaaatttcttccctggctttagcattgtccttctctctattattcaaatgtaaaatacaaatgtctgtggaggaactacttattaaccacctaggaacttagacggaattagttgataaatatgaggatcctgggttatggagagacagtggaagtagaaggaggtgtgacatcataacaaaattatatgtatatatatattttttggtctctgtctctggttcctggcatagagttcctaaaacctgtaaattcctgagcaatgggggtgctaggtatatcttttgttctactattttttttttttttttgagacagagttttgctctgttgcccaggttggagtgcaatggcacgatctcaactcactgcaacctccacctcacaggttcaagcgattctcccgcctcagcctcccgagtagctgggattacaggcacctgccatcatgcccagctgctttttgtatttttgtagagacggggtttcaccatgttggccaggctggtcttgaactcctgacctcaggtgatcctctagccttggcctccgaaagtgctgggattacaggtgtgagccaccatgcccggcctactatttggcttttaaccctgtctcctgacacagagcttctagtccttgaggtttcctgggtgatgagagcatcttttgttctaatgaggtgactcctggtggctcctggatggcagctggtcactagaaagacgataccatgattagaagcatagaactttcagcctcatgcccccattttctgggaaggagcaaggggctggagatggagttgagtacataattggtcatgtctatgtgagaaagcctccctaaaaatccctgaacaacacagttcagagagcctccaggttgctgaacaggtggaggtgctgggagattggtgcaccccagaaggcatggaagctgcatgccccttctcccctataccttgctctaggtgtctcttctatctggcttttcctgagttgagttgtatacttttgtaataaactggtaatcaagtaacaaagtgtttccctgaagtctgtaagacaatctagaaaattatcaaacccaaggaggtggttggggtcagaagcacaggtgacaacttggacttgccattggcgtctgaagaggggcctgttttgtgggactgagctcctaacctgtggggtctgcactgatttcaggcagatagtgtcagaattgaattgtaggacacccagttggtgtctgcagagaactggaaaattgcctggtgtgggaaaaacccatatacatctggtgccaaacagagagtgttatgagtgagtgtagaaggaaaagcagtggctgggtgcatggctcacgcctgtaatcccagcaccttgggaggctgaggcgggtggatcacgaggtcaggagttcaagaccagcctggccaagatggtgaaactctgtctctactaaaacaaaaattggccaggcgtcgtgatgggcacctgtaatcccagctacttgggaggtggaggcagagaattgcttgaactcaggaggcagaggttgcattgagctgagatcatgccactgcactccagcctaggtgacagagcaagactccatctcaaaaaaaaaaaaagaaggaaaagcagtgagttttcccatacacagtgtaaaaggagataaacctgtgaagaaagggatgaacaggccaagcacagactttatttacatcccacacttgtcttgagaagttttcatgaagctacacaccaagagaatggtagctattttattattggtattattatccttgttaggtttcattttcctggtttcaccaatttagtttgttgaggttattttgcccttgcagagaagggcaaaattttacacacagagattgtagtgagttgaatggtggcacccaccccaaaatatatacccacatcctaatccctggaagctgtggatgggaccttacttggaaaaaggatctttgtagatgtaagtaaattaaggatcctgaaatgagaccatcctggatcatccaagtgagcataaatccaacaacaagtgtcttttttttttttttttttttttgagacaagttcttactctgttgtccaggctgaagggcagtggcacgatcacagctcactccagcctcgacctcctgggctcaggtgatcctctacttcagcctcctgggtagctgggactataggcccacaccaccacgccatggctaatttttgtatttttagtagaggtggggtcttgccgtgttgcccgggctggtcttgaactcctgtgctcaagggatcctcccgccttggtctcccaaagtgctgggattatcaacgtgatctgcccgcctgaccttaacaagtgtctttttaagagaaaagcagagggaggtttgagacggagaggagaagccaagtgaaggtggagacagagtttagggcgatgcagggaggaaagccaaggactgcctggagccgccaccagaagctgggagaggccaggaaggattctcccctagcactcccagaggatgcagggccttgctgacaccttgatgtggaacttctggcctccagggagaataaacttttaagtcaccaaattggtttgtgataatttgttacagcagccacagaaactaacacagagggtattttcctcctcacagtctgaaggacctgcccaggggaagaagtaaaccacctcttacctttccgaccatctcagaaccacgaggaaataggaagtgaggcctggtatgcagagggacgactcaaacaggtgattaaggaattaaccagtcacttgttggaggataatgcctcagtgagcaagaggcatcccgagttcatagcagacaaggacgcctgacagctctggtggtccctgacaagtctgacacccacggagaagcctgaggggacgaagctggcctgggtgatgggcgccatgttggatcccagggaggcaggaaggcaccaggcaacgcccctgactgggagtcatcccaggccagcgtcttcctgtttgctcaggaagaaacattcattttctctggcctcagcctcctaaactgaaaaaaataatgttgttccactctaagaatactgctgcgggctaatttattcatggctgtgacacacatagctttctttaaaataaagtccctggtgtcatttttaatagggtcataaatgcaactcgaagaaactgtctttttgcatctacctgtgattgtttctttgtatcagtcagggtagtctgggttattctgtggtaacaggcagtgcccaaatctcactgttttaaaacaatgaaggttgttgtaggctgaactgtgtcttcagatgtggtcacattctgaggtgcatatggatttttgaggggacacagttttttaaggggacattggtcattgagggaacacagatctttaagaggtaattaaattcaaatgaggtcattagggtgggcttttatccaatatgactggtgttcttagaggagaaaatgtggacacagacacagagggaagacgatatgaagataaaaggagacagtgcccatctgtaagtcaaggagagaggcctggaatggatccttccctcatagccctaagaaggaaccaatgctatggacactttgacctcagacttctaacttctacaactgccgagacaagcaatttctgttgcttaagccacccaatctgtggtacttagttacagcagccctagcaaaccagttggcttagaatgggtgtattaatccattctcacactgctctaaagaaatacctgagactgggtaattaataaagaaaagaggtttaattggctcatagttctgcaagctgtacaggaagcatagcggcttctgcttctgtagaggcctcaggaagcttccaatcatggcagaaggcgaaggggaagcaggcacttcacacggctggagcaagagaaagagatagagaagggggaggtgatacacactttcaaacgaccagatctcatgagaactcactatggcaagaacagcaccaagggggaatctgccctcatgatccaatcacctcccaccaggccccacctccaacactggggatagcaatttgacatgaaatttgggcagcaacacggatcaagccatatctatgaggaatagagatttttgcacttttcagtcattgctttctccctggttcccagaacaggattatgttctagacacttaagaaatatttgctaaattatgttgagttaatcttataataacataattaaggtcaactttggctatctgtgtgatgttagtttcttcaaaataatgtcttcaaataatttctctgaaataataattgccgatgtgggagaagctgtacttacttgtgtcactgagtcctcagtgcaattgcctggagctgaaagtggtgtcctggccctggccctgtcgtgtagcagaagatctatgctcttggagatgctgtgatataaatcaactcaagctagtttagagaatggaaggatttctttttcccctaaggagttaacaacaaagtcatggtaagtgtagggggtccttctgggccacagaaacaactagaagcagagatatttattttattttattttattttattttgagacagagtcttgatctgccacccaggctggagtgcattggcgtgatctcagctcactgcaacctctgcctcctgggctcaagtgattctcctgcctcagccctctgagtagctgagattacaggcatctgccatcatgcccagctaatttttgtatctttagtagagaaggggtttcatcatgttgttcaggctggtctcaaactcctgacttcaagtgatctgcctgcctcagcctcccaaagtgctggaattacaggcgtgagccaccgtgtctggcctagaatcagggattaaaatagcaccacaaatctctctctctctatctatctatctatctatctatctatctatctatctatctatctatctatctatctgtctgtctatatctatctatctatatctatctgtctgtctatctatctatctatctatctatctatctatctatctatctctgtctgaattctatatgtgcttctttcttcatagcaacttctttctttcctactgtgtcgtgctgcacagtggcgtcctctatatggctgggacctggctattggattctttccttagctccaacttgggtgctacctggagaaacattttgattggtctcccttgggatgggtgctctctctggtcccatcaactgtagcctgatgaccatgtactcttgcccagtgtagtcgggtgtttactctggctttattagctgtggtcaaggggacagtctatagcatagacatggccaccagtcaccattgttttaatattcattgaaagaaaagctagaaacccatcactatttatgcagactcttcctttttcttgggttcctgttcctgcttcatagttgattcctttgtcactcatcacagcctgcactcaggaattaaccatgttgtactttatactgatccctgctaaggaatctctcaaactctcagaaatgcccaattctgtgacaaagccagaccaccctctacaggtcggggcttgtgcccaccacaggctaaacagtctaggtttggccaagagcagggtttgaagaaagaggcatatcacagctgggcactcagtaggtgtcagtacattgtgttgaatgaaaggttctgagccagagtcctgaagcaggcacctgggcaggcacgatcacagggctctcacctctctagctgggacctgggcctgagctcagtccccgtgatggcccttggtgaactttctcaacatatccctttcttctcctttggtgacttcccatggctgaattctacctttactgtgtacagggttgctgtctatctcaagcccctccctgccacctatcataagctccataagggcaggcagtctttttcacaccgcatgcctgtcatctagctcactgcctggcatatagtaggtagttgaatacatgaatagggtaatgggtgatcagggcctggaggaaggtagcaggggaatctgtactagacccagagtcaggaaaggcatccccaagaaatggcattaaagctagggtgagaatagcctgggaggaggataagcacagagctccagggactctcctctctccttctctgcccagggacctgctgcaagctggcagcacagacacagccagtggggaacagcttgcagcaggcccctggacagggaaggaaattagtggcagagccaggcctagactttgactctccacactcgctgtcacagccagaagagtccctggtttggttccattccagaaggattatagtaggttgatgctttcttgaactccaatgtggttaaaatcatcaccaaacacttgggcccagtcagaggactccaactgtttgatattccatagactctcaagaggaaaccataattgcctattagtcattttgcagctggtaccaaattacgaaagacagcacactcgtgtgtgtgtgtgtgtgtgagagagagagagagagtcaaaaagtggatactaagataatgcagaatggcttagaatagttgagaaaataaacacgtaaaaagattagtaaataagaaaaccattgagtcatttatttgaattatataattgattcagaatagattaaacaccacaaatggatagagctgatgctcttaaaacccaaaagaaaacactttatccatagtgttggcagtgttggttcagtgttaatccaaatacgatatgaagctacccaaattcgaattaaagggttcttagtacagcaaacgccaggacagaataacaagaatccaccatccacccaaagctaaaaaaatgctgtgcatgcatgactgaaacccttctttcccaagtggaaacaccaacgcattaacaaatatttaatgggacttaccatgtgcgaggtactcagagaagcttccaaacttagcaaccccttttgtggctgtcctgagagatcctttcacatttactaattgcacctcagatccatttgttgatgaaaagcaccatgcagctggagatcttttatcaagattttacatcccctccctcttgctatttggctttcttttccaacggcatccaaaaatggggcatgagctcatgttcccctgtgctgccccttgttcacttcttccctctttcctaccaccattcaaggggcaggtttaggtgatctggctacagattgttcagcccagttggacccctttaagagttcttctcacctttttacaccgttggtgggaaagtaaattagttcaaccattgtggaagacagtgtggtgattcctcaaagacctagaaccggaaaaatacaatttgacccagcaatcccattactgggtatataccaaaagaaatataaatcattctattacaaagatacatgcacacatgtgttcattacagcactattcacaatagcaaagacatggaatcaacccaaatgcccatcagtgacagactggataaagaaaatgtggtacatatacaccatggaatactatgtggccatgaaaaggaaaaagatcatgtcctttgcagggacatggatggagctggaagccattatcctcagcaaactaacgcaggaacagaaaaccaaacactgcatattctcacttataagtaggagctgaacagtgagaacacatggacacggggacggaaacaacgcacactggggcctctcagtgggtgggagaacattaggaaaaatggctgatgcacgctggacttaatacctaggtaatgggttgataggtgcagcaaaccaccatggcacacgtttgcctatataacaagcttgcccgtggaccccagaaattaaaataaaataaaaattttttaaaaaagagttgtcctctgcctgagcaacataggagaccccatctctaaaacacatttcaaaaattagctgggcatggtggcatgcacctgtagtctcagcaactcaggaatctgaggcaggaggattgcttaagcctgggagtttgaggtcacagtgagctttgattgcaccactgcacgccatcctgggcaacagagtgagaccctgtctctaaaaaaaaaaaaaaaaaaaaaaaaaaaaagttgtcaagccgggcatgttggctttcgcctataatcctagcactttaggaggccaaggtgagtggatcacctgaggtcaggagttcgagaccagcctggccaacacggtgaaaccgcatctctactaaaaatacaaaaattagccgggtgtggtggcacacgcctgtaatcccaggctactcaggaggctgaggaaggagaatcgctggaacctgggaaacagaggttacagtgagccaagatcgtgccactgtactccagcctgggtgacagagcaagactccgtctcaaaaaaaaaaagttgtcttgtggcctagaaagttgtccctccactacacagagtccctggaggacatctaggactcaaggactcccttaccataaaatgacacatctgcacagagcagtaatttgatgaatgagtctctgtgactcccctgtagactcacagcattgcttctcaggccaagttctggaacatatcatcctattcccccatccatactgccctctgacaacaagtatctgaaatattttggcctagattcctatctcaggcagacacctagaattttagaaaacatcaagttgagtattgttgttagaggtggcactagacatttagcaacccagaagccaaacccacaagggaaaggtgtgaccagggaccacgcagtggacaagtttcagtgactgatggaaagctcgttataaccaaatgacatctcttcaccaggtgtagtggactgaataatggctttcaaagatatcaggtcctaatctctgaaacctgtaaatattacatcatttggaaaaaatatctttgcagatgagattacattaattatactgagatgagggagattatctggattagccaggccctcaatgcaatcacatttatccctgaaagagaagaccgaggtagattttacacacacacacacacacacacacacacacacacacacacagaggagagggtgatatgaagatggaggcagagattagagtgatgtgtccacaagtcaaggaatgcttgcagctcctagaaaccaaaggaggcaagaacagattctctctggaacctccagagacagcatggccctgccaacccttgattgtggcccagtgataatgatttcagactgctgccttctggaattgaaagggaataaatttttgttgttttaactcacctggtttgtggtgctttgttagggcaggcacaggaaactaacacaccaggtacagaacataaagagaggcgtcatgtgtgagagacatgcctttctcatttggcctttcccagaattaggtgtggctggtaaatctcagtgcttgatgtcggatattgattgcataagacatgcgagaatgacgtgagaggctttataaatccaatgagtcaaccagggacgggtggttggctgtggagacgtctaggtaagctgcgaccatgaccgggttaagctaacacttctgtgagaacacgtgcttcatacaaacagtccagacagacctagaagatgtgatctcctaggtctacaaactcctacaaagcaggagaccactgagatattaggttggtgcaaaagtaattacagttactgccatttaaaagttatggcaaaatcacaattacttttgcaccaatctaatgtaatcacagagctgcaacagaggttagtgctcacttccttctgcccatctgtgtgacaaagtcccagggttacacagccagccaggagggagcctcccctggcacccatgagtctcatgactcctagtttcctgttggctttctttctggctctgcctatctgctatggacctgtcattcatgcaaattgggtgcctctgtttctcgggagctgtgtagagcctagacaagttcaaatcatcccaaaggacttagagtaggtcggaatcaacataatcaatgcccctgacactgcccctccacatgccctacaggagttgggagcgcgcacctccaccctatattgttgtctccaaattcttctctcccttcccttctctcttcttccctgaggtcagcctcacattctgcaggtctagcgaaagggtgtctcacctcaatcatgagaaagaggagtcccagctccaggagaagcaggagcagcccaggaaggggcttctcagaccctgagaactgagccatggagtggccatgtgctgttttagaacacagctgacaggacaccttggctcttcttcaccagagactaaaatcaagagaagcatcagaagttttggagttctcactgttcttgccccagggccacagagcttcagctacctgctcctcccacaagatccagataactctcagccaccctagaggagtccttattcttctaggcccccaagggttctcaagcctagacacattaaaaatacctgagtatttttaaataatcccaatgcctgagtccctctcctacagactctgatttatttggtctggagtggggcccaggaatccatatatttttgaaaaatcactccaggatattctctctctctctttttttttttgtactttatttattatttatttatttatttatttatttccagagagggtctcgctctgtcacccaggctggagtgcagtggcgtgatcttggctcactgcaacctccacctctgatgttcaagcgattctcctgcctcagtctcccgagtagctgggattacaggtgcctgcaactatggccagctaatttttttgtatttttggtagatacggggtttcgccatgttggccaggctggtctcgaactcctgaccccaagtgatctatccacctcagcctcccaaagtgctgggattacaggccactccaggagattctaatgtgcaagcaagattgagaactcttgagctgcctggccttcagactttttattttgcatcccctctcagcaaatcatgaaaagccttgtcccctggcatcacagcttaaataagttaaagtagttgcatggaatattatttctgacctattatacataactatgaacatttttaaacaaagccattttaaatgtattaataaacatatccaatgatatctaaacatcatagtgatttgatatctattatccatttgaaaatacataaacaagccgggtgcggtggctcatgcctgtgcttccagcactttgggaggctgaggcaagtggattacttgaggtcaggagttcgagaccagcctggccaacatggtgaaaccgcatctctattaaaaatacaaaaattagctgggcatggtggcgggtgcctgtaatcccaaatacttgggaggctgaggcaggagaatcgtttgaacccaggggacgtttgaacccaggttgcagtgagccgagatcaggccactgtgttccagcctgggtgacagagcgagacttcatctcaaaaaaaaaaaaaagaaagaaagaaaaaatacataaacaagctcctttatagtagtctaaaattttacactacttttttttctccttgagctcatattttcattgcctttccctaatgtatttttctaatgtaatatatttttatactccaatgcctgttgatcatcctgttttatttctctgccacaaaaatatctacataaattgaaaattttatacataagacttttattctgcattcttaagccctaagtgttaaaatatttcttcttggttatcatgaatgtcactagtagtacccattaatcagcattatataaaaatatcacgttattaaacatgaatacaatttttaaataggaaaggtaaaattgcattttaaatgaatttctcagtgagctagatgagtatttgttcgtgttttccaatgagctcatgtatgtgggaatgaatgagacagagttagcaacagttttattttcatccttagttttatagattcaggtgctggtaaacattggcttacacaaataagtaggaggaaagagaaaaatttctcttatattagtagcactcaattctctaagctccttccaaggtatctgccaaaaatcatattttccatctgtcagttgacagctcaattaagtactccttcaattttgctcaaggcaaggaactagaaaccatttgacttgcagaaggatttgttactcagtcattagaaccactaatttctcttactctctaggaagtacaccaaaaagctttaccaagacttaccaagtgattcttaattataagtttctttggaagcatattttcatacctggtatattcagaaaaggttgaaaagcctgaaatatcattaatttcaattcttgtttatcaacgtaatttaaaaatctatactttttaaactacgtgctttgtgggctcgccccaccctgccccccagtttcagtcattcaacatacagaaaatgtctgccgtgtaatcaaaatagcaaggccaggtctcactgtcaaaacaggcttactttctgttagaaaatgtccagctttgccaggcacagttgctcatctctgtagtcccagcactttgggaggttgaagtgagctgattgtttgagcccaggagtttgagaccagcctgggcaacatagtaagaccccatttctttctttctttctttctttttttttttttgagacagaatcttgctgtgtcactcaggctggtgtgcagtggcacaatcttggttcactgcaagttccacttcctgggttcaagcaattctcctgcctctgcctccaagtagctaggattacaggcacctgccaccacacccagctaatttttgtatttttagtagggacggggtttcaccatgttggccagtctggtctccaactcctgacctcgtgatctgcccacctcggcctcccaatttctacaaaaataacatttagccaggtgtggtggtgtgtgcttgtagtcccagctactcaggaggctgaggtgggaggatcccttgagcccaggaggtcaaggctgtagtgagctgagatcttgccactgcactccagcctgggtgacaaagtgagaccctgtctcaaaaaagaaaaaaaaaatgttcaactttattttttaatgcaaatctttctgttgacttgcgtcctccatgatggcatccttgcattcctgactgagacatggacagctgggccatggagctccacccaccatgaatgtctgggtgacaatgtaatggggtccaggtgaagaaaggctcagctctgtcagggcatctgctttgtgcccatgggctccaccttaggagggctgccatctttgacagccagggcagggggtggcttatggtggaagaagggacccgtgtttgggtgggttctccaagaaacagacccacgatgagcttacacatgcagagacttggcatgcaaagattttgttagaggaatcaaggatgagagaaagcaaaggtggggtggtggtgctgaggaaggccgggaccggtcagatggcagtgtgagtgcgaggctgcatgaaggagagagggtggaagcatcccaggctgctgtgcaccctcaggaagtttcagcaaggccaccagggaattcgcgagtcaagtctggccatcggaggagtcccgagtctcccaggagcagatctgcctcagtttcccagtcgcattcagtggttggctgagagcagctcacggtgatggaatcatgcacatttgtgccagtggatttcagaaggcaggaactggggcccctgagtcaatttagccccctggagctggaattctgtgaggagccttctcatggccactccaggaaatgtttgaatgaaacttgtcaccacttctgccaccctggtctttaacagatgtgaaacaagagcatgacgacatggacaaaacaccgtggtttgtccattagccacaatgtacttaagatggaaccaatcatgggctcgtagtatcttgattaaagaaggctaatgccaatgtttcacattgttattgtttggcacctgggatgtttttaacacccctggggcaatgttcatactcagacgctggagaggtgaaagggatctcttcattttgcacggtgggacaggagagattataaatgggcagaagggaaaggactccttgtacataaactaggacatccctgtgtagaggttcccatggacatccccgaggggcagtgtcagtttgggtcagtctacttcttaagaagcagacactaagatggaattagacacgcaagagattgattgactgggggacacatctgtgaaaggtaaagagaacgccttcagagtacagctcagacctgatacctgtgggaggagtgaggggaggaaggaggcctggggaggagcaatctcagggaagcccagcagatggagatcttcaaggcaaaggagcattcactctgctcagtgatggactgggagcagcttgaggagtgcagtgggggtgctgggggctccctgtgagggctgaaacagatcagaatatgcagaacgcagtgcaccagtttctctctatgcggcaggttgccttgaagggagatcagagcagcgtactttgtagctgcacagtattccctcttggggacatctctttcctcccattgcctccttctccctctccccacactgtgtagctccttagtctcttctccttcaggcctcagcatcccctctccctggtctgtccgactctcccccacctcagtctccatttgtgtcatgaaaaatctatgggccccatccaggtgcacaaaagtcacagccaggctctctcctgcccactctgctgtggaggtggaggggagagccctgagccctgaggatggaggcatggagaaaagaaattaggatggtcttgactcaaagtgacagctcacttttcttttctctttctgattttcctttgtcagccttggacatctgaaaataaactggtcctctggcaccatgagggttaatctctgccattaacttcccctggcctgcaagagatgtccttcctgcaggcacaacagtgggacaacatgttgctaatagagagtcagtaacctgaattgcattacaaaacagctccggtaaattagccttgggaagtgccctgcccacttgctgggtatatttttgcttgtatgtagcaggcagaagagggaagggctgtccagctcccaagcaactcccgaaactctgtcttccattcggaaggctggactttgcatcactcaactttgtttcttttcacacattcccgattctaaccctaaatagatttaatacaaaataaaccccaccccagattaaaatagtatattatttgtgctttatatgagtctcagaaattactttcaataatctctgtataaagttttaaaaccctaaactagagttaaacttgtggaaaagaaaggaagaagtgaatggttaacaccaattcacagtaggtattttactttgtaataatactgctgaatttctttctttacaaaaaaaagcatgcatttataatccttgatgatcacaacaaccccttgataataaaattaagtttatgacatgcattactgaaaactttaaaatgaggcatctagagcccagagtgattaagcaacttactcaaggtcacacaggaagtgattaggaaagctggaacaactctttggccttttggatcagacctctatgctgaaaaagaatcctgagtttcaagtctggaagatgaggaaggaagccgtgatgtttggagacagagtgtgccttctatagctcaagataaaattctgttataggaagaagctcagatttcttaaataccaagatttgatcccaagtcaatgaccaataaaagcttattatctgcaaccatgtcagactctggcccaagagtttaatctttctaatcacatattctatacattattcgagaaagaaaggtccggaaaagcatccctaaagactcaaatattccaaggagcaaaaaatatagataagacaaagctccaaagactcctaacagtggaaatagctgtcagatgttatagagaagggagctgatgggttcccacatgctattaacaaaccatgaagaagtcccttagcctttggacctggagttctcaaccctggctgcacattagaatcacctgggaagcttctgaaactcccaatacccaagacatacccaggaccatttatatcagaatcttccagcgatggaagcctggtgttgggaagtctttaaggctccccagctgactccaatgtgtagccaaggttaagaaccatggctctaggacctaacacataagttgaatgaatagacggatgaatgaatatcagcaacagaattgaaaaaagaagaaacaattaagaaactaaatttgatgttatttactcagatggaagaccctgaggtcctcactcaaaatgcgtatgctgttcacgcagaagcagttctatgaagtttggatgtcaagattctcagctcacaacagggatgagaagagaagatggttctctgtggagcagagtcaccaacaatagcaggaaggacaaatgtgacagcctgaaagacaagtaagaaatgcaaatcctacttctatggttgaatgtgtccccctaaattcatgtgttggcaactgaatccccaatgctagttttgagaggtgggtggtgttaatcacctttaagaggtgattaggtcatgaggctctgcccttataaatggattaatgtcgttagggtgggagagggttagttatcgcaagagtgggttcctgataaaaaaggatgaatttggcatccttcccctttctctttctcacatgtactctattgtccttccaccttccaccatgggatgaccagtaaggccctcactagattgtagccaccttgacctgggacttcccagcctccagaatgtaagagataaatctttgttctttataaattaccgagtctttggtattctattataacaacacagactaagacacctataaagcaggagacagaactcagcgaagagttgtctggggccctttaataccagggtaaactgacctgcccagcccagtttccctggaggcgtcattgtattagcagaacagtgcagttaattggtgttcgggtgcctgagtcacccagcggaggcgaagttctgttctctctacactgtgtaagaactcacaggaggatgggcagagcactcgacttcctcagcactggctatcacagactgcccttactagaactgcgtctgtttttgaaagcctgggtgggtttaatagttggtaaaagcagcatgttaaagttggcagcagaaactgcctcctaagagaatcacttcctaagaggggaatatgaaatttctcattgaggcaggctgtccccttctgtccctttgtcagggaaagcctctctctgggggaaagcaaaggtggagctggggtgcatagacctctgtggagagaaaacctgaatttggcaaagtggtcctcttacagatttcttagtctgaggagttaagctttttcttggttttgcaaattcagtgtctcttttggcagacatttgttattagaagagatctgtactttctcagcagggagtgacattgctctgtgtccttaagatattgcctgttctagggagttgggtatgttctccaacaagctggagacctagatctgtatttccgtgggaacaggaggcctctgcagacttgaacttgacctcacactaaaggaaagcctgtgcgaaggaagaggacaatcttagaggcagtcatttaagtctgagtgccccagaacacagggatgttgggtggctactttctggtgccatttcatttgtcccactcaaggccataatgcaagcttggggaggaggaactcccctgagaaaagagaccatccctgctgataatcctactaacctgattctaggtcagtaaatgaaaacttgaaaggtgaatttcagactggagaaggcagcggggaaagggactcaagtccgtttttctcggaccaatggcagtgtatggtaatgtggggctagccctgacatcgggaagacagttaagagccaaacatggtgaggaactctggggctgggtcaaggctgggtcaaggctggaagctcagagccacatctatttggaagtatcagctgttctttgggttgtattttcttttttctgtcccctgaacaatatatcaaggaagtttggctgcaagtaactgcctggtccctgagatgctttggggagaatggggaaggcaggtctggaagggagcacaaaagatggcaagagagttgctatgagcaggggtcaccagcagagggcagagggcagaggtgcccaacggagcagagagtgctcaatggccatgggcggcaaagggtgcagtggggtcgcagtcaaaatgcaggctgagggggacctgggcatgtgggcaacggcatcatggcgctcacagaactctttagaggatacactgaagggcaccaatccctgacaattagcaagtcaggatcgaagccaacataattcgagtatttcatggaaacaatatctaactacaaacagctgggtcttcaacaggtgggaaacactgggaattgaagacttgtgttcagaaattctatctaccagctcccagccatgggacttcaggcagttcccctgcgccacccagtctcggtgcctcatacgacaaacaggtgcctgacatttaccctacagacctcttgaggttgttgttttaagtagcaaaggcaataaagctcacgtatattttgtaaatggtaaaatactttgcagacttaacacactattttatcttggaaagtttttccaactgaaatgatgaaccaggttaaacattttttgacttttacctgtgatcctaacaggcactctgggggattctatctggcaagtgtgggaaacacagctggcatctctcctggtccactggcctcccatggggggaaggacagtccctaggaagcagcccatggatatagggaggaggtgtggggtggcacactcatctctgacttacaggaaaaacagaaactttctctaaagcaaataaaatgcagaaaatgcagctcagcatataaccaagataaccaagcagagaaaaatatttaagtcacaaattggcagtttaaggagtatcagcattctgagggaaaattcaggagacagctgatgaatccacaagttcttactcaattaactttaattggctagtatctgataggcagctgttttaggcagggcatgatggaagttataatgttaaacagaaatagatgtcagctttgcccttagggaaccatatatatatatatttgtttttgtttttgtttttgttttaagagactggtcttgctccgtcatccaggctggagtgcaatggcatcattatagctcactgcagcctcgaacttgtgggctcaagcacactgcagcctcgaacttgtgggctcaagcaatcttcctacctcagcctcccaagtagctgtgactacaggtgtgtaccatcacccccaattaatttttaaaatttttgtagagacagagtcttgctatgttgcccagattggtctcgaactcctggcctcaaatgatcctcctgcctcagcctcccaaagcactgggattacaggaggagctgcaatttttgagagagaaaaattgacatgtgcaagagcagcaacaggccaaacatgagccatgagatcctacacctataccatccaatatgggagcaggccatgagccacatatgggcagtgaactctagaaattcaggccactttgagaggtgctgcacatgtaaaatacactccagagtccaaaagcttggtacaaaaaaagagaatgtaaaatgtctcattaatcaatttcacactgattacatgttggagtgatatttttagtatattgggttagataaaaaatattagtaagttttttttaaaaaatgcttttcattaaacatcagttatctgatacatttatttatgtgggatcctcctacccaaataagctttaattagatgttgttgtgctcctgttaaattcaattctgtggagtttagcaccactgccaagagcctccttcttagcacgtctcttcttcctctttagcggcagttctcaaaatgtagttagaaggcagagactctgttttcacctgaatttaatctaaatctgattccaatcaagatccagataaaatgcttgttacttatctcagcagctagtttcccagattcagggagtaacataaaacacctgcctagcaatagcagaattctaatgttttgaatgccttgggccagggacacttttgtcactattcagtttcagccatcaatgaaaactccttcttcttagctacctggtatggacggttgactaactggttgaaaaacagtcaacagtctggttagcgtctttgaagcttcctgaggatgtgtaccactcagtcataccttcaccgtgcttacaagagcatctgttgtgtatgtagtggctgccccacaagtagttgtattgataaattctaaatgttgctattctttttttttttttttaaagagtctccttttttttttttttttttttttttttttttttttttttgagatggagtcttgctctgtcgcccaggctggagtgcagtggcgtgatcttggctcactgcaagctccgcctcctgggttcacgccattctcctggctcaacctcccaagtagctgggactacaggcgcccgccaccaagcccggctaattttttgtatttttagtagagacggggtttcaccgtgttagccaggatggtctcgatctcctgacctcgtgatcgcccgcctcagcctcccaaagtgctgggattacaggcgtgagccaccgcgcccggcctaaacgttgctattctttagaaaggctaaagtccagcccctgaaagaagcctggaggctaatgttttctctttcaaatggttagtgatgaaaactgaaccctttggagattctgattttattctgcttataaaagctaaacttgaacttcactggatagggtggattgtatgcaggtcctgataaaatccctacacaatttccctcccttctaggctgacctgccgtgcctgcagcccacaagccacccccttcttttcccacgcatggcccaaagctacgagctctcagagtttttccttcttgcagcacgagatgacacaaagataggttctggcagttgcaggtacgttcacctcagcaattctagaaaatgccttgtaattactaagcagaaagcacacaatctgagggggctggagaactaagtcttcacataacaaaatctgcttctatatggcattttatatcttccagtgtgatggggaaatgggaacgctttgaacagctgaccagatgaattttaaacaagaattggtaaaaattggactattagagattttgagcattttcttgtggatttattggccatttgtgcatctttgtgaagtgtctgttgaggtttttttctgccattttaaattgggttgtttgtctttttattgttggcatgtatgcattctttaaaaattgagatgtaattaaagcctaaaagcattctttatatattttagatacaagtcatttgcgaaatatatgtgttccaagcatttttttcccagccagtggtttgtcatctcttttcatgagctgaaattttacattttgataaaatccaattttttttatggttagtgctttttgtgttctgtccaaggactctgcccaccccaaggtcatgaagttattatgctttatttgagtaattttgtggctgtggttattacatttaggtgtatgatctattttgaattaactttgataaatggagtgagatagggattggagctcatttttttccacacatatatccagttgttccagcaatattgttaaaaagactttcctttccccattgaattagcaccaacaactggaaataatccaaatgtccagatataggtaaatggataaacacattttagtctattcagtggaataatggaataataaaatacattccatcattggattctaattccagtaatagaatacattcatggaacaatgaaatatattcagcaaatttttttaaaaagcaaactataaatacatgcaacaagctgaatgaatctcaaagacattatttgaatgaaaggagctaaaagcaaaagagttcttactgtatgcttctacatacatgaaattctaaaacagacacaactgattctatagtaacagaaagaaaatcagcagtttcccggttgagggtagggatggaaacttttctggcacgatgaaaatgttctatatcttgttttgagtgttggttacatggacatttacaattgtcaaagtttatttgtctgaaacatctaagggctacacgtttcactgtgtgttaattacacctccatttaaaatatattaaagaaaaaaaaggattagaatgtgaaccttcctggactgtaccttacaataaatagcgaaattcctctctctccgcagatgccttgctgttggaggctgggaaaggaagatgaaatgtgcagagcccttgacttctcccttttcttaagactgtgggataaatttttcaaaacattggctaggagacttgcattcaaaaccagctgagtaaataatggggctttggtgagttgttttttcccttctgtgtttggaaatttgagcctggtgtatctttttcaagcacatctcatttagaggataatttacatttgcacaaaatcatggctacagcccatctgctcaacgattatgtaagatccaacactcattagagtgtgacatgcattgatcttagtgagcatatgaacttgtgtgcttgggattcaagttcttctaaaataacttccagcaccaaccagctaccatagcctgttgtttctgacattttccttggaacatgacagttaatatccatttgaaagaaactaaattattggggggctttaaattcctaatggctatagcagattttctggtagagttaagcaagattgagttggcagttgtgaaagggcggaggctagaaggagagctgtttgttttttgtacctgatggttttatcaccaaagagtatttgtaataatgaaacagctggagcagtaacatgattcatattaatatatgcatgtaaatgggttaggaatggaattaacataatttctgtgctctggttttcccttagaagtggagactactggtttatttacagtctgcaatgagcacagccaggcagttctgctgctggacagatggcagggaaggccaggccatgtgctgtggatcagggggtgaatgtgaacatgacggtggatggcacagctctgcaaaggggctggccagaagcagagagcagatgaaaacaaaggttccttttgtctcccagagttcttagcccttcccatttagtccctttgtcctagttcctcctgccagggctttgcagagaaggggagtggggagatacagggagaggccaggaccaggggttccaaggcagaacctcgtgggaggaagtgaccagaggaggggctgcagtcactagactcagggcactggcaggaagcaggaactgtgaccaggtgagaaggtgggctcagagacactggagaggaaggacaggtcgaggaaatggtccacaggccagtcagcctctcaaagctgagggaggcaggcagtgagagggcccaggaaacaccctgctatcaggacagaaatctggccgggggacaggaagttgagtgtgacgcaccaggagactttgaagcctgtgataccaagaggaaatcctaggccatttagcaaagaacagaatttggccccacgacacagaggcccttgggaggaaagtgaatgcctaaatagaaaacaggcctggggaggccactatagggtggtcttctgtattttttccctctccgttttccattataattcatctccttccaaggccaggttcactcccacgataagagaggcaaagcccctggtcagaagggaagaagcctccatccccagcccatgtctgtctgtctcatttgtgtgtgtgtgtgtcttggggggaagtgaatggagaaagataccggaagtattacagtgatggttgtcccccatgtgggaacatggagtaagagggaaagtcatttgaggaactgcccagctgttctccaccatggctgcaccatttacattcccactagcaatgtataagagttacaatttatccccatcctcaccaatactttttattttctgtctttttcatcttagctatcctcatgagtgtaaaattgtgagtttaatttatatttttctaatgactaatgatgctgagcatcttttcatgtgcttacaggctatttatatatcttcttagaagaaatgtctgtttaaatcccttgctcatttttaaattgttttttaaaaattgttaaattgtaagaattccatgtatattctggatacaaattcctagtcagtagacaatgtgcaaatattttcttccattctgtggggtgtcctttcactttcttggtagtgttctttgaagcacacacatttttaattttgaaggagtccaacttaactatttttctttggttgcttgtgctttaggcatcacatctaagaaaccattggctactccaaggtcatgaagatttatgctcatgttttcttctaagtgttttatagttttatcttttacatacaggtctatgatccattttgtgttaatttttgtatacagcgtgagatggagttgaaaattcattctttagcatgtggttatgcagttgtcctagcaccatttgttgcaaagactcttctttctccattgaattgtctttgtgaccttgtcaaaaattaattaaccataaatataaagatttgtttctggactctcaatcctattccattgatctatatatctatccttaggccagtatcttccagaggcaaaagatcatcagggtggcttttagcagtgggaatcccagaagagcccacaaggcacccaatagacacagtcgtttcagagagtgcaaagccagctcacatggtaccagtgaaggaccctacaggtgctagaggatttctggatgcaccatgaaaaggggacaggacccttagaggggaatagagtagacttttttctttactccccattaccaacaaggtgggggcaagcctttgcactcagcagtaacttgagcacatgagttttgccctagacattctaaagtgttgtttagtgacatagaggatatgtataggacttgattacagttttgctttgactctggccataagtacttttctggctacatcttactcttgcacttgtcctgccttgtcttcccagcagatctcagactctctatgcctgcctctccctggctccatgttgcactggggtccacagttcagctcagccagggtgtgtgatggccaactctcctcatgcctccagccctcccttgaccatctccactctgatattcccagaggcactggtttcctggggctgctgttagaaattaccacaaacttagtgccttaaaacaacacaaatttattctctcacagttctggaagtcagagtttgaaattagttttattggatgaaagtcaaagtgttggtagggctggttccttctggaagctctaagggagaatctatttccttgccttttttacttctagatgccacctacatcccttggctcaggtccccttcctccatattcaaagcggccatgaagcatcttgcttctatagttgtatgtcttctgtcttatatggtcaaatctccctctgccctcctcttgtaaggacacttatgattacatttaagacttggataatccaggatgatgtcttgatctccagctcaacttaatcacacctgcaaagtccctttgctatataaggtaacactcacagcttctggggactaggacaacagggcattagtcagctttccacaccaggtgggatgcgtgcagctgtactggctaatcagagctgatgcctgttctgactggttgggttctgtgccaggtgtctatattttacttcgctctgagcagttatcaaatattttgaatatgatccttgttgtcagccttctttgttaaagagatgagtagacatgaatctgtagaagcctggggaaacaaagtgtgaaaccgattggtgtcctcctgtaaaaaaggcaagcgtgagtcaagaaaaggaaaatcatacaatagaaaagtccagggacaggtcagtcatatggatctgaaatatctgagatggttaagagaaaagccacagaaaagtgaagagcaaagtgtcttggcctgctgagcgggtaataaacaacagagagcttcctgcagtttcaatttaacctgaatcccacgtggagagacagcctggagccaaccaagaagggcttgtttctgtgcaagaaagatatggtagagcctagggccagcctggaagctggactccggatgagactgaacagaatgagctagaactgagatgcaaatgtaggacatttatttcccacacaggtccctgaacctgtacagcaactcctgccttcctttggtggcattgcctcccagagagtaatcactggatccatcagtcacacagaatcattccggagaatggaggttctgggcctcttcccataatcatcagactctccaggggtgggattctggaatctacattttaataagaacagataattcttaacatgctaaagttcccaggcaggagcactttaactgttatatttaggagacttaggagcataatcttttcataggattctgtacaaatggtttggagtcagccatgaatgcaagtgaaatagtcataaccgtcatggggagagaccccatagtcatgtgagacgtgaaggtttctaccgcactggccaactgtgattgattgatggtggatacctggatcatggtgttgagataaatgatgaggctttgcctgagctgggacaggaagagagcagcaattaattagtaatgtctgccatggctataggttggagatggtggttggtggtgaacaagtgcctcctatctgccattttctcctagaaagacctcactgtaccttctcattttatgatgagatgaaatgtacatacaaaacactggatagaaacatacatgtacagtttgaagaacaaaaataaaacaattctttaaaaattgtctctagtgagctggttccaacatctccttgggtaacacgttgcattgtctcacaacttgcttaatgtctaatttaaataaatcccttttggcacagtttaagtccagtccctttcattctatcctcagagaaaaacagaacagctgctcctgctctcctattcaatatgcttccctattttaaagaattcagttcttcagaaaaaaattaatgagactcttctattttaatgagttacttgtttggtggattggcacttttcctcccccaagctcaacattcttggttacagaaatgaattagaatagaacattgagagtagaaggaatttagatgtcattcaattctctgttttcacagatgggacaagaggcccagggaaatggaggacctgacttgctcacacagcagaatcagaactaagacccaaccatcctacctttcagctgagagtaacttctaccagatcacgatatttggatacgcagtgtgttttgaagttggagaagaaatccaagaccaaacacgtattgaggtttattttccatcacctcagtggcttccattctccagcttctgagtctttttgtttgtttttgtttttttgagacatggtctcactttgtcaccaaggctgaagtgcagtggtgcgatctccactcactgtagccttgacctcccaggttcaagtgatcctcctgcatcggccccccaagtagcatggactacaggcacatgccaccatgcctggctaatttttgtatttttagtagagatgaggtttcaccatgttgcctaggctgttcttgaactcctggactcgaacgatctgcttgttttggtctcttaaagtgctaggattacaggcatgagccactgtgctgggcctggcttctgagactttttgccagagggcttcagacccacacctggggcaggccaaaagcactgggggcttcattccccaggagcaatgcttaaggagtgtgggtcgggaatgggtggataaatgctcctgattcttcaccgcttccttgatgtcgtgattctggggtatgtgttccctggtgactcagaggctcctcagcagatctgatccccagttgcccaccccagtgactctctcgttaatgtacccttcatgaacttccctcctgccctctatcctttccctacttcctcattatgctttctgagattatctcccaaataaattatttatacccccatccttccttccggaccttcttttggggaaatgagaacatttccatacttataagaccatacttataagaaaagagcataccaggaagctcgaccagagctgtgaagccggaagtttgcctgcgaatggatttccaatgctgtaatcctcaggatcagctttgccactcacagagccaagtacaaagtgaaaatggggagtccctggttgggaaagcactaagactttcaagatgatgacagcagagcattaaaccatgggcagaggccaggcatgagggctcacgcctgttatcccaggactttgggaggctgaagcgggcagatgacttgaggctaggagtttgagaccagcctgaccaacatggtgaaaccccgtctctactaaaaatacaaaaaattagccggtcgtggtggcatgtgcttgtagtcccagctactgggaggctgaagcaggagaactgcttgaaccagggaggcgggggtttcagtgagccaagatcacaccactacacaccagcctgggtgacagagcaagactctctttcaaaacaaacaaaaaaacaaacccacagcagtgctctcctgagtatgcagcctgcagcgtgagtgactacacaggttgcacagccatgaagctggccccgctaatctctctgtaagaattactgtaacactgatgacaccatttgctgagtcattactgtgtgccaggcaatgtgttggactctagattgcatcatgaatactgtaggggaggaaaagatttttttcctcgctcaccacaaggtttatggctgaggcctttataacaagacagattaaaccatacacatttgtttagtataagtttcacatgacacagaagcctttaaaactgaagacccagccgggtatcctggtgtatgcctgtggtcccagctagttgggaggctgaggtgagaggaccctttgagcctgggaggtcgaggctgcagtgagccgagatcgcacacctgcactccagtctgggtgacagagtgagaccctcagtcaaaaaaataaaagaaaaaaaaaagaaaagaaaagtcatcagtacccaatgatagtcactgtaaatattgtgtttcctttcagtctttgttgttgttgttgttactgtgtactcttttacatctacctttatcaaagctaagatgataggcagcctttttcatttaacagcagtgttaaattagtatattcccattttattgaagttttttgaagaccttttcaaatagcagcttattatgcaacgtgtgaacagtaatttaacaattctcccattcagagatgtgtaaatttgtttctgttttttcaatttatcaataatttactggcacagccttgcacccctgctgcagtgtaagacagtaccctgtgaccttgtctcttttagcattggtataaaattttaaaaatttttttggataattttataagcaatttataatttataatttttatttatttattttgagaaagggtttcactcctgtcacccaggctggagtgcagaggtaagatcacagctcactgcagcctccacctcctgggaccaagtgatcctcccacctcggcctcctgagtaattgaaaccacctggtgtgtaccacctcaccaggctaatttttcttttttgatttttttgtagagatgaagtctcgctatgttgctcaggctggtcttaaactcctggactcaagcgaccctcccacctcagcctcccaaagtgctaggattacaggtggaagccaccttgccttgcctgaaggcaattttttaaaggcatgtctcagagaggagttttgagtaatggcctaatgtgttggaactgagagtatgtaacttcaccaggtggctattttaaagaaaaccacagacacctggatataaaagttttgaaatatggatttttaaaaacccatctatgactttgccatcatccccgtagttaatactgtaaatgatcaatgacagaagaaatcaggatgttatgagcaggatcttcagtgtttgtaaggaaacctgcaggatgtgtggctgggctgaactgtgcccaagcacactttgttcagtgcagtttagaaatggcttgtgatggttgggtactgtgttgcctttgctttatgaacactttagaaagctttgcactgtgtggtaataagtaggtttttcttctttttctctttctttctttcttttctttttttcttttttcttttttttcttttttttttttttgcagttgcattttgttgttgttgttccctcatttgtttttgttatcttgcatccaaatacccttcctcctcagcagcaatgttgaaatatcaggcaagtaggtgttacaccccatgatgtgaggagaagggaggcagaggttccctctcactactccttggtgatgagagatgagcttagacctggccaatcgtgttctccacccgggactctgactctcaagaagtgatacaaagatacagtgaagattgacccctgccaaggcagcaggtgttcagtggcccgtgggggaacgtctgggggtggggctgtgaggcagtggcagtggcctagcagatggtccctctctgtggattttggcagtgttcttggctgctggtgctccttttattctcaacccatttccaagccatgctcttcaatgttcccattaatttcatacaccctttccatacatcgtgtttcctacttcagtttgccagagttgacttgtgtttgttgtcaccaagaaacccggactctgctccttgtcaattatggtgtttattttaatttgtttctaaaactaagtatgaagaattggtcaggacctgtatttctttttgtgtgtgtgtgagacagagtctcactctgttgcccaggctggagtgcagtggtacaatctcagctcactgcaacctccacctcccaggttcaagtgattctcgtgcctcagcctcctgagtagctgggactacaggtttgtgccatcatgccccattaatttttgtatttttagtagagacggggttttgccattttggccaggctggtctcgaacgcctgacctcaggtgatctactcagcctcccaaagtgctgggattacaggtgtgagccaccgcgcccagctgcaaataccatttttatgggaaaataagatgggccccaaagcaccttgttaaggatcataatctggcataaacacagcccatttgtgaactggaagcacttgtcttcactgccttttgtcaatactaaatcccattgtgtcttcatgtttttttacacagcccacatttcgagatttactctttaaaaaaaacccaaaccttgtgacatctttgtgtccacatcctttgccaagaactctatgctcatgttcttcacttctataaacttagcttcctgactccgctaccagaccctcgcccaggactttgaacatagaactcctattctttccagcccatgatgatttctcagagaaaccatcaaatgcagaactgatctccttccaccaagtgtcctccccatctgcatgccaggtcttaggcctgaccttgtcagccatgaactagttttgcccaagcctagcacagcagcattgaccaaagagtcctttgtgttccagagcttacaagtctattaccaaccaaatatagatgtttcctgtgtcctccagggaaaagttctccaagtattgcttttacactagggtatatctggaagagcaaacatgcaagaacaaaacattcaggaatattctgaaaaaagggtaatggaaaggacttgccctactagcaattacaatttattagaaagcaaactcatataaaaatatgggtattgtggtaataaacaggccaatggaatagagcttcagaatgggaattagaaccaggagggaaagatatcttctttaatacatggcatcaatggacagttaactagctatttggagaaaaaatttcagcgggctccaacatgggagggtgatatgcttgatgtaaagatgccaacaaatgtagccaaggatataaagtttctttaatggcaggggatactgaaaagtgtctgaaaatcatgcccacacaaagtggattgagggcgcccaggtggaggctcccaggcccctgcacgtcccatgagaacacaggtgcctggaataccaatctcctagtaagagaagcgtgcacccgcctgttcttgggggactttgtgccctacctggactctcctacctgttctggagaccctggctatgtgcctagtattcatcaggtctaagcaacttgttcaaaacagctccaggactttcttaaatgtttgctgcaaggcaaggtaaattgaagctcaacttctcaggatgtgactgtcttctggcaggaccaggcctcaggcctgctggagagtgcttcctctattctcctatctcaccccttatatcagaatatcttccagccagaccaaagatttatatatatataatgaatattggcaataatagtactaatgtagagaaagctctgagaaaagcatgagtaacacttctgaaaaatgggcaaaggatatgaaaaattcaaagagggcaaaatacaagtgcgagtacatgcatgaagagatactgtcattctcaaatgattatgtaaatgcatttctaaacagtgactcagcatgtttcaatgattagattggcaaagattaaaaacattgagaatctacaatgttagtgagagtgtggtatgtagaaattcttatttacttttggagaatgttagtaaagttatcttgaagaggaatttggttgaaactatcagaagtttcagggtacattgctggtaggaattaaaaaatggtacaaccattttgggaactagatactttcttataaagttaaatatacacctactgtatgaaccaaccagtcattacacttataggtgctcaaggtccatggaaacaaatatccacacaataccatgtacaaagatatttgtagcagctttattcactgtagcttaaaactgaaaacaacccagaaatctgtccaccaaaaaatgcataaacaaattgtggcctacctatactgtccattccatccaccggatactactcatcagtgaaaatgaaggaagtactaatatgtacaacaacacatgaatctcaagggaagccagaagccagagcccatgctgggtgtagaactcttctttatagaagatctagaaaatgggccaggcacactggctcatacctgtaatcccagtgctttaggagaccagcctgggcaacatagcaagacctcatctccactataaacttaaaaaatttagccaggtgatttggcatgcacctgtagtcccagctacttgggagactgaggcgggaggatggcttgagcccaggaagttaaggctacagtgagccgtaattgcaccactgcactccagcttgggcaacagagcaagaccctgcctcataaaaataaaaataaaaatctagaaaatgtaggccaatgtatagtggcagaaagcagatcagtgtttgcctggagcaggatataaatggggggatagactacgaatggaaaagaagaatggaaatattctgtatgttgataatgctagtggccttacaggtgtatatattaatatatattcacaaatgtgtatacataaacacaggtattatatatatgttaagactcattaaattgtacattttatataggcccatttctgtaaattatatctcaacaaaattgattttataattacatcaaaaagatacctgtattgctatgtttattgcagcactgttcacaatagcaaagagatggaatcaacctaagtgtcgatcaatggatgattggataaagaaaatatggtgcatatacaccctggaatactactcagccataaaaaagaatgaaatcatgtattttacagcaacatgtgtggaactgaaggccattatcttacatgaaatatctcagaaatggaaagtcaaataccacatgttctcacatataagtgggagctaaataatgtgtatatatggacacagagtttggaataatagacattggagacttgaaagggtgggagggtgggagggggtgagggatgagaaattacataatgaatacaatgtaaatacactattcaggtgatggttacactagaagcccagattttaccactatgcaatatatccaggtaacaaaattgcacttgtacccctcaatctatacaaaatttttaaaaatggaaaaaaatgatttaaaaagttaaagaatgcattctctttgatccagcgattccacttccaggaatttaccgtacatagatattcacacaactgtgcaaatatgcaggcataagggtgtgcattgcatgatagtttgtagttgtgcaaccattgaaaatggccaaactatccaccaagagggcagtagataaacaaccaaaggtgaaagagctgctatagcctgtcctgtaaactccaagagggctgtgtctccagacctcacacagtgctgggcatactttatgcagggatgtggaaagggagtcaaggtatattaggtaaaaaaaaaaaatcaacttttaacttttaggaatagatgaacccactagaatggaactatttatgttagagccagaattaatttggtgtctttaggattatgtgagaagactgagggtcttgtaggaagactttgttcttgggtgaggctgagacatccctgggagagttgaaacaggatgagctgctgtttgctgcagggagatcaaaggaagagttcagatgcagacaagtgagggctaagtgtcccgccatagaggggtttagtccactgcagtgccctgtgacaggggcctcagagaaccacagcaacacagggctgtcagaaagggaaaagggtccatgccctactcactgggacctgggacctgtgcaggtggagccaaacaaggttggttcaggtgaaggcaatgagcaccaggggtttggcctgcttggttcctatccaggttgtcatcggctccagcaggtctcatccaaggggcagacctccaagacctcagcatttcagcagcagtcggagaggtgggaaagagcaaaggaagcaaaagcagaactaacatgctggatgaaggaatccatttcccaagtccccagggtcagaatgtcttcatctcttgagggatagattccctgcaacagaaacaggactggggccagactcatctcccctctctccatctcccctctctccatctcccctctcttccccatctcctcttgatgggaaaggcccaggctgagtgcagagcaagcaacgaatcattgcatgatgaggaaggatggtgcagtctcttccaggcctcgtgctctgggcttccaggcctggtcctatagtcatgaggctctggaaccggggaggggaggaagtctgtatttcaaagtcctctgtgcccttcctttgcatggaaggtgacggtttgtgttgttgggatcaagttgacatcactaggaaggtgtccttagtcataagggtcatggagaagcagtaacacgtgccactggattaatggtcttggtgctggaagacagtccagaaattttttggaaggaaaagtagaaaagtgatatcaagccaatgcttatccttggtctgtgactttcagagatttccaggagctgctgtttcttgatttgagttctagaggctgctctggcctgtaggtaggacagacactgtaatttgaccccagagaccatgggatgttcctaaaagtagttatccttggctggagcactaactggtgtcaggagagctggcaaacttcttggatggtgtactacgttgaatagtgactccctcaaaattcacgttcatctagaacctcagaatgtgactttatttggaaacatctttgcagatgtggtcaagttaaggtaacatcatattggattagtgtgggccctaaagccaaggtctggtgtccttatgaggaaagagagatttggagacacaaacacagagacacacagagaaggcaacgggacaacagaggcagagattggagtgatgtgtctgcaagacaaggaagtccatggatggttcgttccagcagacattgaaaggggcaaggaaggatccattccaagtgtcttaagagagtgcctggactggttggccccttgagttcagatttctagccttcagaacagtgaggaaatatggctgggtgtggtggctcactcttgcaatcccagcactttgggaggctgaggtgggtgtatcacttcaggccaggagtacaagaccagcctggccaacatggtgaaactctgtctctactaaaaatacaaaaattagccgggcatggtggtgcacacctgtaatcccagctactcaggaggctgaggcacaagaatcacttgaatccgggagacagagactgcagttaagcgccactgcactccagcctgggtgacagagcaagactctgtctcaaaaaaaaaaaaaaaaagaaaagaaagaaaagaaaaaggaaaataaactaaactgctgttattttaagccacccaccttcttgtgccacttaatggcaaaccaaggaaacgaatatataatacataatactactaatatataattctgatactactaattctaatatataatgataaccttagttcttgtggaaggaggtatgaaggagtacatcacattattttcaagggcaaacagtggtggaaaaaaagctgaattttaagttactaaatttagagaattagtaggaatttgcatcacacgagggtgtcttttactgtcagatcagcaattagagcagaggcttggatctggtagacttggggtcaggtgccagctccctcacttaccgtctgtgtgaccttggggacactgcttctctgggggtcagttttctcatctttaaacctagaacaataatagtttcatctcaaagtgttgctgcgagaattatataaaaccaaggtgtggcgcatcatggaggggtctggcccctcaaaaatgcttacacgtagcgttgctattattgtttttaagttacagacacaatgattttttttttcaataaacttgattcagttggcacacatgcacacaaaatacatagatcttgaccaggccagcatgtggacacagtctttccagagctcgtgagatgacaaatctctttattggggtattaatgtcaggtccaggagattcaatattcaatccactcatcaaggtcgtctgtgtagacagccattcactacctatagacgctcctcaagaaacagatgctttctggttttctgccaagaatgtcaacatcagattactcctaagtatcactcatttccacgtgaattagacagaacagtgttaagtggtttggagccacagctggctctcaatactgcttcaactcacactctgagaagaacgacagttgactgagccagcttccacacctctcaagagagtttgctgttttattccaaggggcagtaacaggaacatttctgcttgctgcggcccctaaatgtgcagcattctttagaccattatatggtgctttccccttctcagcgttcagaaacgttgagaaggaaagagcctcatcctattttttagcttcttggaggttgcagttgcttatcttttttctccactgggatatatttttctcttgcccattttttatgctgaattttctaaactcctttataatgcttttgctggtgagttacctttggaatgaatcaagtactttcactttctctatccagaagggtggttcacatttgctaccagtctattgggaagatctgggctcaggacaccccccacagattactgcaatactttccaaacatgtgcatttatcctgtaaccaccgattactgtaacactttctaaagatttgcatttatcctgtacctatatataacttaaggtctgcttacactctgaagactataaatagattcccacctgttgggctggtttccaggaaagatgcagggcccaggcacctagttctctcattggttaaaatgtaagtattagtaccttctttcttcttcttttttttttttttttttgagaagaggtctcgccttgtcacccaggctggagtgcatggtgtgatcatagctcactgcagcattggactcctgggctcaagcgatcctcctacgtcagtctcctaagtagctggaactataggcacctgccaccacgcccatctaattgttttatgtttttgtttgtttgttttttgtttttgtagtgatggggtcttgctatattgcctaggctggtcttgaactcctgggctcaagtgatctcacctcggcctcccaaagtgctgagattatagttgtgagtcaccatgtccagtccccttctccctctttcttttcttcttaattaaaagtaatttacatgacagcaattcttgtacacactacccagatttaatgtgttaacacttcaccttattgcttcaaacattgtagatacaacttaagaacccctgccctcctctttcttgtaccctcagaggtaattatcatcatttatattttcccagaaatgtttttgtatttttgctccacttaatggctgaggggctggggaaatggtattatattcattgccatttccttctttccatttcttttggggactctgtgctttttgaatgaaaggaaatacaaagggacttcacaaagttcatggaaaaatggaattaaaagctaaaagtaaaaaaatatataaactttatttctcaacatttgctccatcaagttgaagacacttgtaagcgatgatactaaccatttagttcgtccctaaaaaactgagggtcagtgccaggcatggtgggtcctgcctgtaattccagtactttggaaggctgaggcaatattgcttgaagccaggacttcaagaccaacctgaactacatagcaagacccccatctctaaaaacaataaaataaatagccagatgagttggtgcgtacctatagtcccagctacttgggaagctaagacaggaagatcacttgagcctaggagtttgagggtgcagtgagctatgatcatgtcactgctctccagcctgggtgatagagtgagacttcatctcaaaaaaaaaaaaaaaaaaaaaaaaaactgagggaatttaagcatgtcagtatagtcttttttacattagtaattgaagaaaaatggttgtcttttaacaaaaaaggcagaagaagccaaatcaggacagtaaggtggatgcctaatggtttcccaccaaaactctcacaaaattatctttgtttgatgagaggaatgaacaggagcactgtcatgatggggaagggctctctggtgaagctctcccaggtgtttttctgctaaagctttggctaaccttctcaaaacatctcctaacaagcagatgtcatcattctttggccctccagaaagtcaacaggagaaatggcttgagcattccaagaaactcttgctgtgacatttgcttttgatggatccattttggctttgactgggccacttccacctcttggtagccattggtttgactgtgctttatcttcaggattgtactgacaaagccatgtttcatctcttgctacaattcttcaaataaatgcttcaggatctggatctcactcatttcatatgtccattgagagctctgcccttgtctgcggctgatctgggcacaatggtttttggcacttatggaatagaaagttagctcaactttaacttttcagtcataattgtgtaagctgaaccagtccagatatctgtggtgttggctattgtttgtactcttaatcatcaatcctcttcaattagggcatgaacaagatgaattttttccttgcaaattgatgtggatggcctgccactatggacttcatcttcaatattgtctcatcccttcctaaagtgagttatccatttgtaaactgctgatttcttcaggacgctgtccccatacacttctcataaagcatcagtgatttcaccattcttccacccaagctccaccataaactcaatgtttattcttgcttcaattatagcaggattcatgttgctgtgataggaactcttttcaaactgatgcgcctcaaaccagatcctgtccagccatgttacaacaagttagtgtgtgtttattttggtgcaaaaaaaaaattgaaatccatgcattgctttttcagaatacacattttctatgaacttcttaaagaccccctatggaccctgagagtcagttattcaagatgtggcttattagggtctctgatcaagttgcaaatagtctaaatttaatttaaaaagaaacaacaacttgggttatagttgaagggtccttttgacgggtccgtcgagcccccaagtattgcccattttgcttaaggtcaaagactgaatttataaccctaaattagcctctgaaaggagagtgaagtcaatttaagcccacaagatttttccagtgtgaattgtttgctcaatgctggttcaagtgcctaggggggatacaagaaaatggcaaagtgccacgtaaaaattttttttttttttttgagacagagtctcgctctgtgcccaagctagagtgcagtggcgagatctcggctcactgcaagctccacctcccgggttcacacgattctcctgcctcagcctcccgagtagctgggactgcaggcgcccgccaccacacctggctaattttttttttttttgtatttttagtagagatggggtttcaccgtgttagccaggatggtctcgatctcttgacctcatgacccacccgccttggcctcccaaagtgctgggattacaagcgtaagccaccgcgcccagcctaaaaaaaatttttttttattactttattttacattccagggtacatgtgcaggatgggcaggtttgttacataggtaaatgtgtgtggcatggtggtgtgctgcacctatcgacccatcacctaagtattaagcccagcatgcattagctattttcctgatgctcttcctccccttaacccctcccagtccccagagtgtgctgttcccctccctgtgtccatgtattctcattgttcagctcccacttgcaagtgagaacatgtgatgtttggttttctgttcctgcattagtttactgaggataatggcttccagctccatccatgtccctgcaaaggacataatctcattcctttttatggctgtatagtattccatggtgaatatttaccacattttctttatccagtctatcattaaatgggcatttgggtatttgctcttgtgaatagtgctgcagtgaacatgcatgtatctttataatagaattattcatattcctttgggtatatacccagtaatgggattgctgggtcaaacgttattatttctggttctaggtctttaaggaattgccacactctcttccacaatggttgaactaatttacattaccaccaacagtgtaaaagtgctcctatttctctgcagcctcaccagcatctgttgtttcttgactttttaaaaattgccattctgactggcatgagatggtatctcattgtggttttgatttgcatttctctaatgatcagtgatgttgagctttttttcatgtttcttgggcgcatgaatgtcttctttcgagaagtgtctgttcatatcctttgcccgctttttaatgggttgggttttttttcttaaaaatttgtttaagctccttgtagactctacatattagacctttgtcacatggatagtttgcaaaaattttctcccattctgtaggttgtctgttcactctgatgatactttattttgctgaaagcaccagttttcggaggattgacatatcaattaaaatgaaaatatttttaaaagagaataataagagatagaccataatcaaacttgaaattgcatgggggaatatctgagagccaaaggaagtaagaaaagagtgaattggggtgacatcaggatacgagagaataacggcagagcagaaatgcggcaaagtgagaggaagacagtaaagaatgatgaaagtcatcctctaggctgggtttcacttttctaaaaactttcctttgaataattcacacagcactcgacagagtgtcattttcgtttttagaccacttaataaatatcgattgtaatggcagaaaatgtaattaaaaattaaaatgctattattcttgagatactgagcctggcttccaaatattatttggtaaaatgttctcacagtcttggacacaacttcagcatgacagagtgaagccttcaatatcacttgaataaatgctgaacagaattgtaaagtagagtcactaaaagaacaaatttctctccatagtgcatttgcttcttttacatgtatactttcaagtaggtatcagaagccatcttttatattttaaaaggctctcctaggaaattttcagaagaatccaaatatcaacatatcctctaattttaattcttccccattagcagcttcttttgctgtgatggaagcaaagttttatgtatagctattttttgtttatgttctcaatttgactgtaaagtaaatttcagtaaattcgatattttttattacttctcttgatgaaattggaggagcatttatttgggaaaatgctatcaatatatagatttgcaaactttatgtgtagcatgacaagctaaggagctacaggctgttgcaagccaatgtcttttaaattagcattttatttatttatttatttatttatttgagacaaggtcgcactctgtcacccaggctggcatgcagtggcgccatcttggctcactgtaaccttgacattctgggctcaaacgatcctcacacctcagcctcccagctggctgggactacaggcatgcaccatcatgcctgactaattttttaaattttttgtagagatgggatttcgccatgttgcctaggttggtctcaaactcctgggctcaagtgacccgcccaccccagcctcccaaagtgctgggattacagatgtgagccaccaaatttttttttgtattaaaaatgatacatggtgattctagaaaaattgacaatgtggaagttttttaaaaagaaaacagaaatcacccacaatgaatatggataaccactggtagcattttagtttatttccttttagttcttcctattatatatgtaaatttttaataaaattgggatcctattgcaggtgcagctttgtttcctgctttttccactttttattatgtcctaatcattacctatattattaaatattatttagaagtgtgatttttcagtgtctgtataatattttctagtatggacttataattaatttaaatataactgtattattggatatttaggttgttcctaactatttactaaacagataaggcgtttcctttacataaatatctttgcagcacctctgaatatttctataacatacatgtctagaagtgggattatagaggcagacactgtggacattttaaagacttgttaaaccaaatttagcctaatgctgcttccttatatgttttaagttccacctaaaggttcttctgtacctcgtgaactataacctaagtggagttataaacaaactgtagcctactcttgtgtcaatcactgagttttggctaatgaaatgtggccaactgttcaaaacgtgttcaaatacagcaaatgccaatctgtaactaatctggctgtttctgtacctcacttctgccttctgaacatcattttcttttttctgttcataaatcttcttccaccacgtggctgtgcaggggtctctgagcctcctctagctcgggagactgcctgattcatgaattgttctttgctcaattaaactgttttacatttaattcagctaaagcttttcttttaacatactcttaacagttatggccaaattgaattctatacaagatgtcctaattgactttcctaccagcagttgataaggtgtctattttactgcacccttgccatcaacacatatgatttttaaaatatttttcaagccagagcctcgagatggatccaagaatcagagcttcagagattcagtgcccatatcagtgggtccaaatgaggttgtgaagggcacctgagagagcaaaacaggctgcagacacagaaagatttgaaatcattcccacaggtactataatatcccgcatgtccactgagttgtttcatgggccagcaggctgatgtgtgcctaggtgtgctgggctagcctaaaggtgcagagcagaggtaggcgcctgtaggaaaacagcctgctgcatagcaagagtgacgccatcttgaagcgaaagcaccataatgacccatgtttgactccagcacaccaaggcgttcctgcggctaggtcaagaaacaatacctgtagcatagataactcctcacgaagatgcttatctcacttccccagtggtcttaattttcgcaggaggatctgagacatgaccagctgcatgctttgccctaaaaacttgccatggaaagaatacttcttggagggccagggcagggatccactctctcagggccaccagagacatggcttctaccataagtccctattaagtgtttctttcgaaaaaagtggatttatcggcctccttctttggcctccttcttcagcctcccagctccctcagccttttggagtaggtttgcacagacctgctccctgcagaacagcaccacaggcgtctttctgacagctctgcctgatttctctttcctcttccttttctataggtcctgttggcacaacctactgacaaccctacaacaaccaagggcctagtctcccttctgttttaagcccatcaagcaagaacaaaagggatataaacacttcctgttccattggaagtaagcctggaatgaagtcccaattccatgccgaggaaccagtgagccccaaaataaagcgatgtctccatatcacatcttgaatcacctccatttccaaccagattcagaatccaatgctcagggataagggagagcgtccagtagtttccactggcctcccttccgtttctcccttattgtctgtccctccaccaggggtatggcctataccagcttgtgaagagctggtggctaaacgttcaggaattttcagaggcgattgttaaatatagttattaaacaattaaatgatgtaacccttccactacataaactatattaaaacaaaggtaataaatacccaaaactcaccactttgtgatcttactgcactttactgtcattgacatctgtcaaatctgtacgggggaaatacgtaatgctgtgctactgttcaactccaagttcagtgatgtcagggtggtagcttgaaatcgatggaagtgaaagtatttacactgtagaaattggccaatgatataaaatgggccttgatttactgttttgttgattgtgtagacttaagaaaatgataaaatgtcaagaatgtggattaaaattaaaagtgtagcacaaatgcagctgttccattctgaatagcattaaaaatttgaggaaataatattccagtattgaaaactattatctaattcgggaaagcggttgctcctgtcatgatgaattagtgacattccaacattcatcttcattgtttcactttcatcttacatgttaaagtacatgaaaacatcaaccaacattcatatcttaaccacactcatccgtcaatgatatgagcaacttctttaccgaattggaaagttattaagcatttattcatagtctgattttatgacactgttgtcgatgacagaattattataactgatagtggattttgaggaagttgcaagtcagagtaatatagacgtataaattgaaaactaaggtaaatatgttagcttgaaaattttttctataattacataaagaaattaacaaaattttacattaatgctcactcagtcttgtgacttttactgatgtaacatacaattattttttagattcagatccctaaaatgccaaaatgatagagtgatcttgtggtaaagctgaaagagatttcagtttaatgaatataatgtatatgagagtgcgaaagtctaatggtagatcacatattcaatttaatgaaagcaatttattggggaaataggtatcagattgggatacaactccacttactcccttttcaaatgatcattgacacaaccataggttgactatggatataagaatttgacaaaaagagcaaaactttctgtgaggatcaaatggctatatggaatttataataaagagcattgtatatgttactattacttgtaaactgtctgatacacactcttttttaaaatttttttttatttttttgagacagagtctcactctgtcacccaggctggagtgcaatggcgtgatctcagctcattgcagcattctcctcctgggttcaagtggttctcatgcctcagcctcctgaatagctgggattacaggcatgagccaccaagctcggctaagtttttgtatttttagtaaagatggggttttgctatgttggccaggctggtctcgaactcctgtcctcaagtgatccacgtgcctcgacctcccaaagtgctgggattacaggcgtgagccactgcacctggcctacacatcctttatatcagaaaaatgtataacaaacacatatacttttttccagagagctggctgttaaacatttaccggcaccccacagctccccatccaccttcaccttacgttgactgccctatcagtttgaatttctgtctaggttccctctcctcagttctgatcacatttcatattccaggccattgcctttacagcaacacttcaatgtcaatgcgattgcacttggcaaaagatcatgtgcatgtcttggctctgcacagcatccttccccgggcttgactaggctgcagtgacccccaggtctctggctgagttcctatcactacagagagctcttccaagactcagccattgcttccaagtgttgggctctagaatttttgactaaattttaaaatagttgtacaaatgtcatatcatattttttccccagaaggagctgccaactgtatattctctagccttgggaaatcttacgtttgatgctttaaatttttgagaatgctgagttctgaacagtgcatgatgaatttgccttatatgagtgtttttgagattgagcagagtctgcttagcccacatatgcaaatacatgctggtgtgaagtggtaatttataagaccgtttttttgttccactgggccaatatggctttgtcaaattattccaactgtgaagtctcatgggtcatggtaagaaataatttctctactgaccacagttgagaaatcctaaagaaatgaggaagatgggcaggaataatcagagttatctcaatagcctcctcctctgcattaaatttagcaaagatcattgctttagacaacccaaccctctttatttgattctttttacacggattgatttccaagatcatacatcctcatgctcagccccagaaaactgattgcattggtgtttttagaattaatttatgggcctctaggggccttcaacactgtctcctttgctcaggtaacacaggaactggctgagattttgcagcagacagatgttgtctggaacgtaaaacaaaatgcctatgctaccaaacaaacgcaaggtttgaacaaacagaacatacattatttttaccatatgcatagcaagggggaacgaggtagcttcgtctagctttgggaccagaagcattttattttttatttttattttcatttttatttttttgagacagagtcttactctgtcgtctaggctggagtgcagtggtgcgatctcggctcactgcaacctcccctcctgggttcaagcaattctccctgcctcagcctcctgagtagctgggattataggcatgcgccaccatgcctggataatttttgtatttttagtagagacgggctttcgccatgttggccaggctgatctcgaactcctgaccttaggtgatccacctgcctcagcctcccaaagtgttgggataacagatgtgaaccactgtgcccagccagcattttatttttgtttgaaattactatattagctcagaatcatttactttttaagaatagtgtatatgaatcaccttagagatcaatttggagcataattgaacattttgaatacatttatgccccttagagatacttggtagatacaaatttaacttcctttttccctcaatctaaaacttcatagagaacctgaagaccagaaggagggtaaagtgttgctaatttttatcttgtcttagtaattgaattaagatgaacaaatctcaaaatgcaccacaagctgtaagataaatacctaggagaatagagtttcaaaaagagaattcttgcaacagcgtcgttaagaaaattagcctgattgtaaatattacctattgaatccgtccttatgtaactttgttaatcacacaaacagccacacatccatattcagaagctaaaaagagaaaacagcatatggctgacaaaaggcgtgtacccagtgcaagatttttcaaagagcacgttcccagcaaacacaatgtcctgctagcagttccaaaaggcttaaagtaaggcatcctggggtccagggccagggagctgcagggatgggccctccacctgccttggctgtccagggtgggaggccactggcctctttccaacttgccctgaattcttgcatcttccctggttgctcagctccactcagcgtagaggtggctaaccccaggacctgctgacacttgtcaaatacgtcactacctattattcattctcataagggagaaatttccagcacttattgcagggataggaagttaacaaactggcaggtgaatgaacctgctgattacgtgctaaaaatcagtattttttgttcctcttctcgcatttctcatcttatactgacatgatacaagggtatgtcagggaatgggttttccgccacttctctgccagttacaaactgtgattcagaacctgtcccctacacatatgagagcttagtttcctcttttgtgaaatgaagaggcaggattaaaggatccctggggaccatcacagctctaacaactcaggaactggggctgcacttcacaccttagaggagaattcctttagggggattaaaagcagcccagacatgtggtctctacagtaagaacaatgaaaatgcttatttcagaacccaaacccccctcctgatgaattgtcactctcctgtcaggccagcacacagcattttcatagggctccttcctccttagagcaccttcactccctcatccaattacctttgcttcatatctaagttcaattaaaataattaaagcagctagcagatagttgatggggaggaaagacatggacaatttcctggaagaattctttaaggggcaatataaaagaccaaggactgtgaaaagtagaatttttcttactggaattcccccgtctgggagcccatgcacttcccagatgtttcccatgatttttatgggtgccacaaggaaattaaccaagcaagaatgcccagttacttctctatgcaaacgaagagcagctcatgcaaaaatagccataccccactgttccagttatctatggctgcctagaaagctaacccaaaatatactggcttccaacagcaaccttttattttatttcccaattacgtgtatcaagaattcagtctgagtgtggctgggcgatttgtccattctacacgtcagccacagaggtcatttagtaactgctggatgaactggtctggagaccccaagatagctcatcctgtgtgtctgctgccttgccagggatggctgaaaggctgagctcacctggagcacccgggctctggtggcttaactctaatagtcaaatcctatttgaattttctctttgctacttaccccaacctctccctccttctcctcatttttctttttgtatttataatgaatattatgatgtctatcctagtctgcttgggctgtataacaaaagtagtataccatgggggatgtaagagcaaacatctatttctcacagtactggtggttgagaagtccaagatcaaggtgccagcagattcggtgtttaatttgagcttacctccagatttgcatcctcacatatttcagagaaaggtcatctctctagtctcttctttataagggcactaatgtcatcagaagactctgctcttatgcccaaaggccccagctcctaataccatcacactggggattaggctccaacatgtgaatgaggggcagatggtacaaacattcaggccacagcaggtgttctttttatcacaaagtactacatgcttactgtagagaattaaaaataaagaaaatacaaggaagaaaatgactcatactgccacaatctagaaataaccacaagtaacgtctttccattctttcttctgtgtcatgtacttagatttcaagtttagatgatatttagttcatgtcttgcttttaaaataaacaatcaatgactattttcttaagtgatcaaatatcccttgcaaacactgtcattactattattattattattttgagataggatcttgctgtgccacccaggctggagtgcagtggcaccagcatggctcaccacagccttgaactcctggactcaagtgttttctccacctcagcctcctgagtagctggaactttataggtgcatgtcaccatgcccaattagttatttaaatttttactagagacaaggtcttgctacattgctggtgctgaactcctggactggtgctgaactcctggactcaagcgatcctcctgcctcaacctcccaaaatgctgggattacaggcatgagccatcatgcccagctgcaaatgttattttttaatgctcacatactacttcattacatggaatgccataatttatttatcaatttcctaattgtagtacacttagattgttttcaagttctggcttgggtaagtaatactctgaacacttacacatcaacttttgttcgcattttaaattatttctttaagggagattctgacaagtagaattcctggatgaatcctctcaccttgaaagtcttccttcctttgacttgtgagtcacttttcctccaggatcccattatctcagataaatgcttcctaacataagccttcatgttttcttctgcatatggctggttgttaaagccatggaacctggtaagatgtgccaagagggtttaaaactctaaaaaaggcaagaaaaagatggttttcaaatggcaaaaatgtgtttataataaacccaaagaagtaaatacaaaagttagtaaagactaaaagttcaataaaatgtctggttatgagagctatctccaaatttcagttccataccaaaaaaaagaaaatataattaaaatatgatgatgtttttaaaagcaggcaaaaatataaaatgcttgggaactgacctaatgcaactggagcaaagtaccatgttccttaaaggagagagaaatacagtaaacatgataattctctccagttacatgtcagagttttaacactattccagttaaaattctaatcgcttactttatcgaacttaatataataaatctaaaattcattcagaaaaataaggagaatattgatgcaaagaacagtgagatacaactagctttacctgaaattgattttattataatactgaagttggcaaaatgatatgattggtgaacattttgtaagtaatggaagtacttgcaaagaaaagctctcgggggtcatttttaacaaactcagatctggagagagcctattctatttgtccctcttaaataagaaaacatgttatttcatgatctggaaagttctggatattgtcatacctctgggtcctggggaggcatagctactcactttcaggcaagtggggtatatacaaaatggataaaaaccttcctgtggaccttccctctggtggtgggaaatcctgtttaactcaggtagcagcatctaaagcagtgttggtgactagctcagtgttcgaggctttgagttccaagacaaagtggccgctatcccccaggaaaaggtggagattagcaaagaggttgtagaacatttcttaggagctcaggaaggtagaaaacagggatctgtctgtggataacaaggtgggcctcagaggaaagtcatgcaactggagttcaagtttacaatgtttctacattatgcctcttaagagatttcaggggtaaccatgaacctcaaggacagctctggtggtagagctatggctggaagaggagctggccatcactaaccaagaccgtcaaagaagccacaggcctaccggttgtcttcctggagaatttgagggcaggtgagtgccaggtttttgggaaccaggttggatcacacctaggttgatcccagcaataacctgtgcctaccagagggcagaacatcactctttacctattttctttactgtttcaaaagggagagaaaaggggagaaaacacactctatacccttccccatcacaacagacatctttaaaaaaggaacagcttcacctgtaagcatagcacatattttaggagacctacatttcttcacgtgtcagatgcattcttaacactgtgtgtgcaaacacatttttataagagggcattttcttttaaatacacacagaagagctgactatataagggaacgctatggtgaaaccatttgtaaagcaaataatcacttcctgaataaatctgtctctaagtctggattttcatattttatatcagatttgactaaaggaagtgctctctacaaatgtatcctctgtccaaattagaatttatctgtatccatgcaaccttcagaatataatttccataataagtcaccaaatgcacatgacagtccaactccatcaataactttacctcttttttgccttttattcatactttagaatatacaggtatctgtcttggttagtccaggctgctataacaaagtaccacagtctgggtggcttataaacaacagaaaattatttcttacagtgccagaggctaggaagtccaaaaccaggtgccagcatggttggtttcttgtgacagccacttttcaagttacagactgccaatttcttgttggatcctcacgtggcaagaaagagagttaacagagctctcgggggtcattttcataagggcactaatcccattcatgagggttttaccctcatgtcctaatcacctcccaaaggccccacctcctaataccatcaccttggcagtcaggacttcaacatatgagttataggaatgcaagcattcggtctatagtaatatcttattatacagagagttatgttttgcttctttgtaaaaccttaggacttcatccacaaaagaaggatgcaaatggccattaatatgtgaaaagaagctcagtctcactagtaatcagaaaatgcaaattagccaaaaccatgtacgagttttactcatcatactagcaagatattcataatatcaaatattgaacaagctatgcagaaaatgtataaattgtaacagacttttttgaaggacagtttgacagtattggtaaatgttttaaatacacataccttctgacccagcaatttcacttctatgaattttccctacaaacatgcttgtgcaggtgcacaaagatgcaagtataagcttgctcattctggcacagtttgcaaaaacaaaaaagctgggcaacaaatatgtctcatagtagaaaactggttaaggaaataatgtccaggctgggcacggtggctcatgcttgcaatcccagcactttggtaggccgaggtgggcgtatcacttgaggccagaagtttgagaccagcctgcccaacatgacaaaaccctatctctactaaaaacacaaaaattagctgggcatggtggcacatgcctgtagtcccagctacttgagaggctgaggcacaagaatcacttgaacccgggaggcagaggttgcagtgagccaagattatgccactgcactgcagcctgggtgacagagtgagcctctgtctcaaataataataataataaattatatccatgctacagaatactatccaaaagttataaagaacatgataaaggcaaatgtactgatatgccaagattttcaggacacagttttttttaaaaagcaggttgcaaagcaatgtttacagtctatctggtttatcaaaaaaaatgaaaaatcaaaacactaaaattatataagaaatacaggcggggcgcagtggctcacgcctgtaatcctagcactttgagaggctgaggccagtggatcacttgaagtcaggagttcgagaccagcctggccaacatggcaaaaccccatctctactaaaaatacaaaaattaaccaggtgtggtggcatgtgcctgtaatcccagcaactcaggaggctgaggcatgagaatcacttgaacctgggaggtgaaggttgcagtgagctgagatcatgccactgcattctaacctgggcaacagagtgagactccatctcaaaaaaaaaaaaattaaaaaaaaaaagaaatacaggtgatagacagatagatttagttaaatgtaaacacatattaagaggctgataggaatatgtcttaaaatgctaagtggttaatctttgaagactgagtggaatgaaagaagtagaactatactttttaattccatcttttatattgcttgatttctcataaagggcctatatttatgtcacagtatataattgcataaattttaatttatacaaaatttaggacatttgttatataatatgtaaaaggggaaaaatcactactaaaatacatgcttagtgatatacatactaggtggaaaatactagaaaccctctccttgcacctgattctttctcattattgtaggaaagctaatcttcagttctgggaaccttgcaggaattctgtgcactaaagttcccagggaaagagaatgctctttttcatctttactgttccactaccttaagaaaaatgagccccagaggattgtactcttgcatacctggggaggcttcctgccaactgagcagggtttccaggtaagaaagggcattggctggatgtaggagagggcagagagcttgtctctactagaaccctcaaatggtgttggggaaactgttcagtaggctggacatgggttaaagagagaatcattggcttttttacttcttcatccccctttccaatttccttcctactttgcagtccatcgatttccaacttctccctgttctttcccatgcccagttttctcacaaactcaaagtgaaagccttgcccagccaagccttgtgctcgaggacctaccttccccaccctcccctccatcatttttcttccctcatttactactagtgtaaagggatttcctataagggtgctctagctaatctaacaagccaattcatgcttagatgtactgatttgagcagagacagcctcccatacctccacctccatatttacttaagaatcacctttggctgcccatcaacggtagattgaataaagaaaatgtggtacatatacaacatggaatactatgcagccataaaaagaacaaaatcatgttctttgcagcaacatgaatacagctgaaggacattatcctaagagaattaatgtagaagaagaaaacctggctggacatggtggctcaagcctgtaatcccagcactgtgggaggccaaggcaggcagatcacttgaggtcaggagttcgagactagcctggccgacttggtgaaaccccttctctactaaaaatacaaaaattagccagttgtggtggcacacatctgtaatcccagctactagggaggctgaggaaggagaatcgcttgaacccgggaggtggaggttgcagtgagccaagattgcgcaactgcactccacttgggtgacagagtgaggctctatctcaaaaacaaacaaacaaaaaagaaacaggaaaccaaatattgcatgttctcacttataagtgggaggtaaacattgggtacacatgggcataaatatgggaacgatagaccctggggactaccagagggaggaaagaaaggcgggtgggggaaaaggttgaaaaactattagatactatgctccctacctgggcaatgggatcaaccgtaccctaaacttcagcatcatgcaatatacccatgtaacaaacctgcacatgcaccctcgaatctaaaataaattgaaattattaaaaaaaaaaaagacagccttggcattaaggtattagaaacatggagagtgagaatctaaagcaatagacctgccccacatgctggaattggggtgttctctgggatgacctggctatccctgagatcctatcagagaaggagagaatctgctccacctttcaagtcatgtgatagcagaaagaccactttccaaggaccaaactcacaaccaagttcctacatttcaaggtcaagtcttttttcttggggcatatcagtctcatcacttcttcaatgaagaggattaggccagataatcacttctagctctgatgtcccatcattttattatttttttttaatctgttttcttcctgacagcataggaaggatcatttagccattagaccatttagcataggaaagaccatttgctgtgggagggagtatagtgtaatggttaactacctaggttcaaatcccatgccttcccttactagctatgtgtcttgggcaggttctttgacctctctgaatttcagctgccccatctatataatgcagctgagaaagtcatccacttcctgaaactgtggagagctgaaagacagaaggaacgtatcgcagcatctagaaccaaagaaaatctctgtgctcttggatacagcagtaaggatacacatctcagggttgaatcactttaaatagttatacttagataatatttcaccacttataaaagtaggcacacaagcccaagttcattagattccttaaataacactttgaggatgtgggcaggcatgagcatctccatgacatgagtaagataaccaaagcctagggtgttagctagggtcaaatactgggaggttgtgaagccagaacacagaaatgtcattcattgttcatttattcaaaacatgtgagggcccgctttctgttggacactgtgctacgtataggagtagaaagatgagtaaggccaggttagaggaggaggtaacagtttcccatggcagagctacaagggtaagcctgttacagtgcaagagctagactttggagtcacctgtcccctacctgaatcctggatccagcacttagtagggtattactggggcaagttactaacagctcactgcctcagtttccccatctttaaggtgcagacatgatgtttacttgaggctcagcaatgcaggagtgttgtgagacaatttttcttgctgacatgcaaaagtacttcccaacaatatcatcgtgatgaattcaccatcgtccaggttagagtcttcagcatggaaatcttcaatccctggttttctcggtagcgtgaggtccagttcttaggggagtccttataattagccaatcctatggagactgatggtgaacttccttggtaactcataattcatgatgacaaataaaatgacttatgtctaaaaatactcaagtcatgatgaagagtgcatggtccgtgacaggcaaaccaaaactaaaaacaaatgagctacgggaactgagtgcttaatggcatcagatctttttactaaatatgtttatttccacaacagagaagttgcttcccagtggcacacccagatgcttcatggaagggcacacctctggggtggtgctgggttcagactggcatggtatccacacttctcctgatgctagctttctctaggccctctgttagctcgtcccgcttctgatggacacatttttttttccctttgctatgtcaacaccatcactatgatctcatccatcaggtatattactaagcaagaaaagaggctctgtcttctaaacaattcaaataagacctggtacctcttccacacaacagttccttaggtgtttctgcaaactctaagagtgccttcagatgacaccctttccccatcacccccctaggaggcagaaacaccaaacagaagctaccaaagtggccagacatggtccaaagctttcacagctgggagttctgagagttggagcagagactttgcagccaggggagatgatatattaacatatatctgagtattgatatatttgaatttttcaaatcccagaacgtaaagggtccactatgaatttgcgttccctcttccatgtataaaaccagatctgcccaagataatatttattttcacacatcatttggaagtatctgtttcatttcattatctatgttgaatgaaaaggttatgtcatttggacttgagcctgagcagagagtgccctgtcattataaggctgtaaaaacaacctcctcttcctcctctccacgctgtgttccctggacatctacctgttccaggtttaagttctgggctaggtcagtgacgtctgagaagagagacttcagggtgcctcttgccctcttgttaagcagagcatggtataaatacctcagcagcattctggactaaagctctgtcaaaacaactgctactgagtcgtttaatttgtggaaaggaaatcttatttggaaaaataaagttcttagttccttgcaacattcttacactgcggtagggctcagaatgctggagaaagcacttcgagacctgaaacccagccctgttattagtaattcatttgctttaggacatgtgggagaaaatgcattccttggcttttgggtccaggtaggcagctctgccagcaacaacttggaaacactttggagctgagtgctttgtgggctgcggcagcgtggtaaggaggctgccctcctgccgaagctgcgagggcagttggaaaggcgcttattttgtctggtaaaagcaaatttccaggcttagctaagcatgttgtgcaacctagccccactgaatgcctatgggaatgctctaagatgcccagtgagcatttctttatgcaacagtgcattttcattttcaacgtaagactcttttgagcccagttcttgtatctaaaggtcttatggtgtcagggccacgagattgtgtggggcctatgggtcacaggttaaaatctagagtgggttcctgtgcattctcagtatattctatgccagactatggaaatgaaccctctacaacaggagacaccattactcagtaaatgcacatgtaaaataatcagataatccgtgagtcatcaatatttattcaattgttagtggtaatagagaagaacaataccataactcacctattttggacacttaggtatccaacaaacacttttcattagtcgattattatacaaatcagtggctgataatagaaattcactcatcatttatctttaggctaggattgcatgatgtgatagcctcccacagttcacgtgccttcttttttttgagacaaagtttcactctgttgcccaggctggagtgcaatggcacaatcttggctcactgcaacctctgcctcctgggttctcctgcctcagcctcccgagtagctgggattacaggcaagtgccaccatgcctggctaattttttgtatttttagtgcagatgggatttcaccatgttggccaggctggtctcaaactcctgacctcaagtgatccacctgcttcagcctcccaaaatgttgggattacaggcatgagccaccgtgccctgctggtatgctcttttaaaaaaaaaatttttatttttaatttttgcaggtacatggtaggtgtatatatttatggggtgcatagatgttttgatacaggcatgcaatgcataataacctcatcatggaagatggggcatacatcccctcaagcatttatcctttgtgttgtccaggctggagtgcagtggcgtgatcttggctcactgcaacctccgcctcccaggttcaggcgattctcctgcctcagcctcctgagtagctgggattacaggcgtgtgccaccaggcctggctaactttttgtatttctagtagagacagggtttcaccgtgttagccaggatagtctctatctcctgacttcatgatctgcctgccttggcctcccgaagtgctgggattacaggcatgagccactgcacccggctggtgtgcccttttaaaaaatattttgctcaggctgttgctgaatgagcttgcatttctcaggatggtacacacaaattaatagcatagaaaagtggccaggaagtgtgctgcatctgaagaggaatcgagtttgagagtaacccttctacagcacgtgttgtacaaagtcctcatggctccacccgcgggatgctcagagagcccttctctgcacaacatttcttacactgccttcctgccaataccccagggcacaagcacctggttttttcacccattcagcttgcattattgtagcactttgattccaaaacacaaaaaaagtctttcatatatttctttttattgattcccccaacaagcaagtaaaagatgtgaagtcacatatcactttccatcaagagacagtggtcactgattagtggatcagtccaaggccagtgctgttcacgtgtctatccgtgctccccttgaagggcaggattgaaatcatgctcctctagtttttagacatctagccagaggagggaagagtgcccagaaccttaacattcaactcagaattcaccaggaccatgggaagcccaagcccttccaggaagattccctgagccctttgacctccctgatgtctccctttcgtggtctcctactgcacttagtgctctgcaccccttctcagatggtgacttcagtctcatcctgtcctgtaacgttttcatgagtgtttgtcttcattcagccatgggatacaatgttatattgggtggtcagccctttttgaagggttaacattggactgaaccttcagtgattaatatcaccaattgggatccttaggaaacagactctggaatgaagattagcacacaggaggttctcagggagtgcttgtgggatcagcgcccatggaatggagaggaaggaagtggcattgggcagagggagaagctgagctatgaaggcctcagccgaccccgcagggggctctggagctgagatagctttttagagttgccctgagttggggcaaggggacaggcacctgctcatgagataatcagtcattggatggtggctcctccaaaaaggaagcatgaccttgggaggggcatctctctttggcagaggcaatgccagaaggcggctcacagctgagggctatctgccggcaacactttgagcacctaggggaacaagttcttcatttctgcagaggaatctcagcactgtgatatagcaaccatagcaacgaaacacaaacatagaaaggaaaagtattccaggtagaggaaacagcaaatacaaaagccctatgttgggacaaaaggaactttctatccaccctctgaaggtttgctctctgaaatagacttgattttagacagacgaacaggagaaaaggcatacaaatttattaacatgcaagtgcacataagccacacaacgtgtgaaactcaaagaatggccagatggttgaagtttaaatatcttcttcataggggagagggaagggaggatataggcaattttagaggaagagcaaatgatttttaggggagatgaatgggcttgaataataggcaatagcgtgggctctggctatggagtctactctagtccttcttcctgcaaagatatccggttgatgagatatctggggaaggaattcccaataattggatatcttctggaggatctggcatttaggtagataggggaactttagggagaccctcctctccccaccatatttgctgcttcccagatgcactcaatttgaagtccaaagtggcatatttgacacattttggggtatctatttttttctttttttttttcatttaggaagagggtcttgctctgttgcccaggctggagtgcagtggccccataacaactcactgcagcttcaaattcccaggctcaagcaatcctcccatctcagcctcccaaagtgctgggattacaggcatgagccactgcacctggcctggggtatcattttctaaaccccaacagtacaacaagagttagcttggcatgtgcaagcaatgggaagaaaaaatacaaatccatcactaggaatgtcacaaaagacagggagcgaagagaaggcaggagctgattgtccatgagttcagtatttattctagtagcagtggggagttttttgagggttttaagcagaagagtaacaggatttatttatactttcaaagattgccctggctgctgtatgtgggccataggggtgagtgtacagcggggagacagcagggcacagttgtagcagtcagggtatgaggctacagtaacttggatgagggttatggcggtgaagctgatgaggagtggctgaattcaggatttatcttaggggatagagccaataggacttgctgataggtcgaatgtaggatatgagagggaaagagaactaaagatgactcctaggtttgtagcctgcccaactggggagctggctggagcattagctaagatggggaaaactgggaaagaaagagttagggtgtgggtatgtgtggaacggaaggaagatagaggggcaaagaagggctcaggattgttttgaatatggtaagtctgagattcctgtcttagtttttgttcccagagaaaaattctgagataagagtttgaatgcaagtttatttcgatagtttattgcatttattgttatgcaaacaatattgcaataaacttggatccttggaggcgagccaaggaaacacagattgggtgatgtggaagtaagacagggaagagagggcaggcaacaaggggtgagtttatttaaaaagacaccagtgtatataccagtggagcttaatactgctggagaactctgggaaacagtacagagcatgtgcctaacagtggttccctgggaaaggtaaggaggctggggtaattatcaaccactcccgtcagtgctctgggattaattgattccttggggtgattgattccttggcacttgtgccatgtaggctggagcacagcaggctctgacagccagaggacatcccaggcaaagaggcaggggctggcaactggaagccaggctggtgggcactgagatggcaagggctgaagggatactggtgggcaagaagagtttcatagtcaaggcctgattaggacaccagataacacaaggagaggggctggtattcggggaggtcaagtgcaagggccagtatcacagttcagtctggagtcacaaagagaagacaagcagtaggtgaggcagcagttagatcagaatgacgcccatggacagagcttatgggcactggcacatcttttgaagaccctgagtcaatattaagagtggacatctccagttctagaatctcagtggattgattgagattgggtgcatcatccaaggatgtcagagttgcttctgcggggaacttgcctaaagactgattaggtgacttttcaaggctgcctacaaacctgagcttctatgagttcctcttttacaaatgcagaaatcgtggtgcaagaaagataagaaaaacccttagactctaaaagtgtgctgatgcccctagctaaagaacactgcacacatgaaagctcatcgcagtgactttttccacaaaggaggtgtgaatattttatcaatattcatgaaaaataattttgtaaggtaagcatgtcaaaatatgtcaaacccgaaggtcacattttccagaattctttttgtcccatattatgtttcaatgcagcatcatctttctgtccagcataagtgccccaggcaatggtaatcatttcattacttaattgaagtcctaattatattaggatctattgtcaaatgtggtcctgtcttcattacaacacttcattacaacaaccataagtaaatggaagtgttggacttttcctgtaagaatagttgaatttaacttctcaatcttgctctctttctttctttctctctttctttcttttttttgagatacagtcttgctctgtcgcctaggctgggatgcagtggcgttatctcagctcactgcaacctctgcctcctggattaaagtgattctcctgcctcagccttctgagtagctgggactacaggcatgtgccaccacacctggctaatttttgtgtttttagtagagacggggcttttccatgttggccaggctgatcttgaactcctgaggtcaggcgatctgcccacattggcctcccaaagcgttgggattacaggtgtgagccaccgtgctcggccaaacttctcaatgtttcatttcccaccccagctcatcctacctttctgagctggtaaccaaattcaaggcatgaagtttttttaaccaaaaagagcaaaacctttgtaatttaaatataatcagcctcccatttgggagatactctgcaaacatcttcatgacactctgggacagctgctattgtcctcttggctgcaatccctacattaaaaattcatgtttgtgtcctttctcggttgtttggcttagctttactcttaaaaagtgtttatgggccaggcacggtggctcatgcctataatcccagcagcttgggaggccaaggcaggaggaccacttgagcccaggagtttgagaccagcctgggcaatatagtgagaccctatatctacaaaaaaaattaaaaataattagctaggcatggtggtgtatgcatgtaatctaactacttgggaggctgaggcaggagactcacttgagctcaggaggtgaggctacagtgaactatgatcatgccactgcactccagcctgggcaacagagaaagaccctgtctttgaaagaaaaaaaaaagtgtttatgatcctccccaaatagactccatccttttatttctcactgaactcccagacagaggttcttaacctgaagctcatgagtcctgtgaatttataaaacagctccaaagacgccacagatacctcgaaattatagaaaatttgatctagctttgcatttgagcctctccagggtaaaaatctttctacagcttctaaaaggaataggtaacctaaaaccaggcaaaacaaaacaaacaaacaaaaaacaccccaaaactttgctgttttaaaatccccattttaaaaaaagattatgtaaaaataatttttcttttttcattttgttttcatctttaaaccagctctccagagcctcagccaggctgcctcatcatcgaatcattctgaaatatcttccacaaaccttccccttgtattcataccaaatagctctcagctatactccaaacccatgcaatgaggtagaaaattacttccctccccctccgattcttaaagtggttaatttttttttcctggaatggacattattaatatttcaaatttgttctcattgctttataaactgtaaccatggatccagctctaataaagatgtcccagtgagttaatcatgctagggaacagaaaaactcagggacattcagaatcacagccagaagggggcaatccttctcacatcatacctaagactgcagctcctgtcaggctgcgtgttcatgtgtaaggcaccacaggccccgtggtgccagctcaccagctcatcttggtgccagctcaccaggtcacgtgctgactttaccagtacatgtatgctaattagttatcatccaattgtttgccttcctaaaggaatgagggcatcatctcctagaatttgtcttctaagctcttctcttgaccccggaaagaaatagtggacttcattgttttagggtgtttcatttttggaacacgaattgcagatgggttcgtggttggccgagaggagccaggccgagaagtttggctattttgtcaaaggcaatgagaagccactgaaggttttaagcagaaaagaattacagatttgcatttgagaagtatcagtttggagaataaattagggaggcgtaagatttggaggcacagaagccaggtggaaggctgtttttcaggctagaaaagtggtagtctgttgtaggttatatgcaatagatttggagagaatgggttagatgcagggatgtttatgaaatgggaattgactggcttactctggaggggatgggaagggaggcagaaaggagtcacagatgacatctttatttgtagattgggttggagtagatggtggtgtcaattaatgagataggaaacctagagaaggagtagtttatttatgggggaaaaaagatatgaggaattgaacttgggacatgctgatctggaggtgcctacaaaccattcaagaaaaagtgtcctacagacaattggagatgcaaagcttggagctaggggagaggtctgggctagaaacacaggcccattccctccatggagatggtaactgacaccatgagagtgaagattacccaggggtagggatgatgaagacagaacagggtccgggagggaacgctgaggaagaccaatatgaagacatggatgaacaaagaggggactagaaagaagtcagcagggggactggaaagaagtcagtagaaagatgtgttatcacacaggtgagccttgaggacattacactaagtgaaaagccagtcacaaaaggacaaatactgtataagtccactcataggagacatctagaatagtcaaactcacagaaagtagacaccagttgcggtggctcatgcctgtaatcccagcactttgggagatcaaggttgagaatcacttgaggccaagagttcaagaccagcctaggcaacatagtgagacccccatctctgccaaaaaaaaaaaactaaaaaccttagccaggtgtagtagtgcatgcctgtagtctcagctactcaggaagctgaggcagaaggattgcttgaggcaggaggattgttcgaggttgcagtgagctgtgatcacaccactgcacttcagcatgagcaacagagggagacccagtcttggaaaaaagaaacagaaagtagaatggtggctgccagaggcagggggcagcagggaatggggaattgtggtttaacaggtattgagtttcaattttgcaagataaaaagagttctggagacacatggtggtgatgggttatggccacacagcagtggggatgtacggaatgccactggtctgtgcacttaaagatggttatgataataagttttatgttttgtgtattttacaaccttttaaaaataaaaagtgtgtgctattgtgggagccaagataacagagcatttggggggatgcagtgtagtcaggaagcatgccaaaagccaagtatgattagaactaaaacatgtttatttattaatactttaccaacgtggtgaccactaatgttctttttaaaagtagttttctaggcatggggggcacagaagtcaggtttctatggattaaagactagagggtttccagtcaagttggccttggaagttcaggtcctcctctttgctgcaatataacaaaacataaaaacatataaaaacacatgaaaatataaaaacaaaacaaaaatataaaaataggccagtataaatagcacatacacacttgctgcaataaagccaagctacaaagggtttcctgactgctcttaaatattctcaacagcattatggggcagtatttccttgtcctcaatacaagacctgggcctgtggtgaagtcaactgtgaaaggggagtgaggggaaatgagagagggagagggagagggagagagagagagagagagagagagagagggagaaataagccaaaattctaaaacatacaaaaacaattaagaaaggcatccaacaaaatcaacagtcaaaagataaattcattctacatgattgcagtaataaaatattaaactatttaatatatatatatatttaagatctacagagtaataaatgaagaacttacatacctaatagaaattttatcaggcaataaagggaataatgaagagaattgtgaaaagaaataacaagaaatatttgaggagaagatggctgagaatgttccatcaccacaaatatgtccttagatcaaaagtattctccccatgccagaaggttaaataaaaataaaaccacacctagaaataacataatgaaacagctgaataaaaattccagagagaaaatcttagaagctaccagagagaaatagcagtcagattagctaaaagggaataggaattaaacagccccatatatttctcatcagcaataacagaagctagaagaccatgaggtggtatcttcacagtgttgagggtaatataaatgatttttcaagttattattcaagaaggaagacaaaactaagacagcaggaatgcaccagccaccaatattccctattaaaggagacacgtcagcagagaataatgtgaacccaaaacaacagtgtgggacacaacacacaattgtgtagacagacatcaataaaatagttcagaaaatcattgttttaaaaattatctttcaggttttaaaaaggtggaattaaaactctagaaacaattacaaatatgtatgagaaggttcacagcagttttattcatagtggctaaaacccagaaacaagacaggtgtaatattaataggtgaatggaaaaataacttgtgatatattcatacaataaaatattacttagcaaaaagtacacaaaaagactgataggtgaattaatatgaacaaattttgcagaaatgctgaatgaaaaagccagacccaaaagtgcacatcaatactccattatttcatttatacaaagttcaagaacagacaaaatgaattcatggtgtcaacacaggggttatacttagaagggaaatatttgttgggatggattacaggaagtctgtggagtaatgtaaatgttgtatatcctggattacaggaaatctgtggaataatgtaaatgttgtatatccttttatttttattttatttttttctttttgggagacagggtctcatttaggatggagagcagtggcacgatcacagcttactgcaacctcgatctcctgagttcaagcgactctctggcttcagcctcccaagtagttgggactacaggcatgcaccacatcatctggctaattattattatttttaaattttttgtagagacagggtcttgctatgttgcccaggctggcttcaaactcttggactcaagtgatcctcccactttggccttccaacttgctgggattacaggcgtgcccagcctataccttgatttttacaattcattgagctatatgctgaatatttatgcgctttattttatgtaaattgtagctgactttttaaaaaacctgccagcattataaaaattgtgggagaaataatgggtacagtcagtaaaagttgtacaattgatcattttaaactcatgatccctaataaccaaatagtgggaagtaattataatgaaagagatgatgtaaggagcagaagaaaatgcaaacaaacaaataaaacaaacctttcactttcattcatatcttcagaagataagaaaggatgttgtgtatatgaagcaaggtcagggacgctaaacataaggaacattttgaaaacaacaaaaaaagaattgttagaaattaaaaatataattttaaaaacttcaagcaaagtattggagaataaaataaaagtcatttcctggaaatcagaaaaaaaaggacaaagacaaaaatagggaaaaatgtaacaaaattagaggatccatttaagagatctaacatctgaattaggcattcttaacctggggtccccagactcctaaaaggtctgtggaatgagttcgttcataaacccatatggtaaaataatacatctttattttccctaacctctaacaaatatacaacatttcctcttttaaatgtccaggcagccatgtgtggcagctcatgcttataataccaacactttgggaggctgaggtggaaggatcccttgagcccaggagttcaagaccaccctgggcaacatagcaagacctcatctctacaaaacataaaaacattagtcaggcgtggtgctgtccttgtagtcccaggtacttgggagcctgaggcggaagggtcacttgagcccaggagttcaaggctgcagtgagctaaaatgccaccactgcacttcagcctgggagacagaacaagaccctgtctctaaacaataaataaaaataagtaagctgggcgcggtgggtcatgcgtgtaatcccagcacattgggaggccaaggtgtgtagatcacttgaggtcagaagtttgaaaccagcctggccaacgtggtgaaaccccatctctactaaaaataagccaggtttggtggcatatgccagtaatcccagctacttgggagactgaggcagaagaatcacttgaacccggggcaggggaggttgcagtgaaccgagatctcaccattgcactccagcctaggcgacagaatgagactccatcttaaaaaacaaaaacaaacaaacaaacaaaacagtaagtaaatatgtaagcaacaaagcacaactttactgcaactttgtcaccaatagaaatcataggtattttacaatcctattgcggttgttacagatatcttaaaattagtttgcattcaactttatttaaaaatggtagtttattaaatttgctattgtcttattatttaaaaacatatataactctataatgaatttatttcttttttatttttatttttaaaaatttatttcttaatgttgtgtcaactgtacctcaaaagaaagtgtttgtctttgtaatcctatgcattttattttgtgcatctaagaatattattgtgagaaggggctcatgatacaaaaacaagagtatttgatctgaaaaatataagttccagaaggaaagtaagctatcagagacaactaatttaaaaaatggaagaagaaaaatatttttagactgaagaatatgaatttccagattgaatggggctgccctgtgctcagcacaataaatgagaaagatccacttcaagagctagaatagtgaacttgcagtacctgtgtgatcaagtaaagaccccagaaatcttccaaagaggaaacaaagtgatatataaagcactgggaaacatgaggccatcagacttctcctcagcagtactggaagtcagaagacaatgaagcaaagcctctgaaattctaaaggaaatcattcccaattcagaattttatatgcagccaaattatctatcttaattgatagtgagtgttgttaacagaaaaacttcagcagaataaaatttaaaagagtttaattgagcaaagaacaattcgcaaattgggcagcctccggagccagggtgggctcagagactccagcacagccacgtagtggaagaggatttatagacagaaaaaaggaaagtgaattacagaaaacggaagtgaggtacagaaacagccaagctggttacagctctatgtttgtcttacttgaacacagtttgaatagttggccacagttgattggccaaaactcagtgattggcacaagagtagattacagtctgtttatacttacagttaggctatagatcaccacgtatggagaaacctttaggctgaatttaaaatacgtaagaaggcagttttagtctaaacttgatttaacactgtagaataaaaaaatttcagataatccaggagtcaggaaatatgtctcttgtgaaaacattgaagcttctgccccagcaaaatgaaagaagaaatcaccaaagtgcagacatgggattcagcaaatgggtaatccaacatggggaagaagagaaacaaattcccggggttatggtgaaggtttgtcccagatcaacatctctacagcagacctagagcgcaggcaagaggatggaggatgtgtacaaaacaaatgcaaatgatcatttatttgatgtgtttcaacatattgggagatttcatccctggcagaaatttgaggataaacagctacttttaaaataaaacaaggctgggtgtggtggctcatgcctgtaatcccagcactttgggaggccgaggcaggtggatcacaaggtcaggaggagttcaagaccagcctggccaagatggtgaaaccctgtctctactaaaaatactaaaattagctgggcttggtggcaggtgcctgtaatcccaggtactcaggaggctgaggcagagaattacttgaacccaggaggtggaggttgcagtgagccaagatcactccactgcactccagcctgagcgacagagtgagactccatctctaaataaataaataaatcaaacaaaccaaaaaaaaaaatgagaaaaaattgaaagttgtagttttaaaaataatttagaaatatggaggttaaatacccaaagaaaaagctagaagagtgattgattattacctttgggagaatggaatagaacaagatttctcaactttgctgctatcaatattttaaagtggataaatctttgtagtgggggggctgtcctatctttggcctctgtcaattatatggcagtatgtcccctactcccagtcgtgacaatcaaaaatgtctccagacattacaaatgtccgggcaggggattggggaaggcaaaatcacccctggttgagaactattagaaaaggagataaggaagaggagtgttttggttataagcctacttgattctttaagttatgttcatgtaccactgtgataaaactaaaaattaaatttaaagttaataggattcacagagattaatggtaattgattagaaaatataattttaagataatgctgttgacaatagcaacaaaactgtaaggtacctcggaataaatctcaaacaaaaatgaacaagaccataatgaaaagaattatgcccatcattaactgaaacaagaaagcctgaatcagtgaagatgtggtttgttcatgtatgagacaacagaacttcataaagaaggatactcttccaaactcaattgtatattaaattgagttctaataataatttccacaggatttttgctggatttgacaagccaaatttaaaaattcataagaaagagaaaagcgtcaggaatatagaactaatgaaagagaatagagagatgatttcactcatatggggaacttggtcagcagcagagatggaattacaaatccttagagaacggatggcctgttcaataaatggcctgggagaatcagctatccatatgaaaaagtaaagtggggtccctatcacatacagaaatcaattccagctatattaaaagcctaaatctgaaaagcaaactgtagataaagatacaggagaataccttaagagacaaaaacacccagcctggccaacatggtggaaccccatgtctactaaaaatacaaaaattagctgggcaaggtggcacatgcctgtagtcccagatactcaggaggctgaggcacgagaatcgcttgaacccaggaggctaaggttgtggtgagctgagatcgcaccaccgcactccagcctgggtgacagagtgagactcagtctcaaaaaaaaaaaaaaagaaaagaaaagaaaaaagaaacaaaaacacaaattttaatggaaaatatctataaatttgactactttgaaattaaaatttcttataaccaaggacaccaaacataacatagaaaagacaaggtgcagccaggagaggtggctcacgcctgtaattccagcactttgggaggctgaggcaggcggatcacctgaggtcaggagttcgagaccagtctggccaacatggtgaaaccttgtctctactaaaaaaaagaaaaacaaaatacaaaaattagctgggcatggtggcgggcgcctgtaatcccaactactccagaggctgaggcaggggaatcgcttgaacccaggaggcagaggttgcagtgagctgagactgagtcactacactcagtctgggcgacagagtgagactagtctgagaaaaaagaaaaagaaaagacaaggtgctctgaaagaagacacctgaatgcacagaagtgacacagggttagtattcagggtatttaagaacttttacccatcaataagataaggataaacttaattgaaaagaaggtaaaggagtaagcaagtaattctaaaaaggggaaatgtacgtagtcagtaagcataaggaatggtgcttattctcattggtcaacaggaaaaagcaaattaaaataccaataatctaccatttcatacttatcagagccttgattttgttctgatattaattatctcccctagtctcagataaatcatggttctgggaaagattttctcatgctaaaaaaaaaaaaagatatctaggctggggtttcatgctaaaaaaacatgaataaataaataaataagatatccaggccgggctcagtggctcatgcctattatcccagcactttggaaggctgaggcgggtggatcacctgaagtcaggagttcgagaccagcctggccaacatggtgaaaccctgtctctactaaaaatacaaaaattagccgggtgtcgtggtgggcacctgtaatcccagctactcgggaggctgaggtgggagaattgcttgagcctgggaggcggaggttgcagtgagccaagattgtgccactgtactccagcccaggcaacagagcaagactccctctaaaaaaaaacaacaaaacaaaacgcacagatatctagtgatatggtatggctctgtgttcctgcccaaatctcatgtcaaattgtgttccccagtgttggaggtggggcctggtgggaggtgactggatcatgggggcagatttcccccttgctgttctcgtgagagtgagtgagttctcacaagatctggttgtttaaaagtgtgtagcacctccttgctttctctttccctcctgctccagctgtgtaggatgtgccagcttcccctcaacttccggaatgattgtaagtttcctgaggcctccccagtcatgcttcctggtgggcctgtggaatcatgagccaattaaacctcttttctccaaaaattgtccagtctcaggtatttctgtatagcagtgcaagagcaaactaatacgtacagggatgtaacagttttatatatgttcaggtctcacagtgttgcctggaactatggcagccatcttatgagtgtgggtggagtgggtttgaagtgaagacactgacgatgagatagaagaactgtggaagaaacgtggtccttaatgacatcgttcagcttcggaattaaccagccctgggactgcccaacaagactgcatgtgttgcaggtgtgtgtatgtgtgtgtgagagagagagagagaaagagagaaacaagaaacaatttcctctttgttgaagacattttgagttgggttttctaataccacaaggcattatttaaagcaacatttctttttcttttttttttttttttttttttattttctgagacagagtctcgctctgtcgcccaggctggagtgcagtggcgcgatctccgctcactgcaagctccgcctcctgggttcgcgccattctcctgcctcagcctcccgagtagatgggactacaggcgcccgccgccacgcccggctaattttttgtatttttagtagagacggggtttcactgtgttagccaggatggtctcgatcttctgaacttgtgatccgcccacctcggcctcccaaagtgctgggattacaggcatgagccaccgcgcccagccccctaaatcaacatttctaataccacacgtcaacgtttaaatcatcctaagtgtccctgatgctacactgtgaactgctcaagataaggaaagtaccttgttcatcattattctctgcacttcacacggtgctcagcagatgctaaaaaattatttactgaataaaggagagaatgctcagactggctctagaaaatattgtaaagtaagtgaattttcttggtatttctttcttggtcccctcttctccttcatcactccacacccacatcctcccaccacaaccacaagggccccgcaaattcttctcatgcaaaatgacaagagaaaaaaatcttccttctttctctatgccccttattaaaaacacacctcttttattcccattcccttagccccattcattgcaaagttaatattgctaatttaattacaccaaaattaatttcttagattccctgtgagatcacatttccatttttacagctacctgcaaaacccctcaaccaaacaagaagcccatgatgggcagatggagctcaatggcaaagtgagtgggtgagatgttgaggggtttcagggtcttcttctagcacctcctagcatccaccatagaggcaatcttgcctctcactggccgccttcctatagaacccatcccagctgaagctcatgaaccagggagtgacacaggcatctccaccagatccaggtggaggagggagtaggcagcactcacactgcacccgggggtggaacagtagtgtgtgaagagaggaacatgaaattcattattcaccggaactgggccagcatttgaactgtggctagcctgttgcccaactccaggtggcgccactcacggggagttttatttccagaaaagcccttcccagaaaacagggcatgtacggtgccccctggagttgtgtgaggataccctactagtttggattcaacaaacaattgagatgagcatggtggcctagagacgatctctcttctgttggtgagtgggcgaactctccagaaccttccaatgcggcctcttgctcaacagtctttttgtggtgaggcagtagagaaatgaaagccatacaggtggagagcagagaccggaggcaggaaacatccctttaaggcggtgttctcagcctggctgcatactggaatcacctgggaagccttcaaaaatactggtgcctgcatgtgatgtaattggtctggggtggggttgggggcagcctggccagccaggatcttgacacactctcaggtgcaccagtgagcggctagcattacctccactgttccaagtctgctttagcaggcaccacaactcccacctaccccaaaccttgtcttgcaccagaagtgtttttactgtcacctgagtttatgctttttaatacttcatgctcattagtgaatctagtagctaatgagcactcctgtagcacaagttaatgctgtttgtccattttttgataggaagaaacccagcactgagaatgtaggtgtttatgtttgagatttacagcgtgcctttcttctttggtggttattttgattcttaaagtgaaaatgttctttctgcctattccctgaggacagagcaagaagataagaatttgagtactgtaaaatgatatggtaaacactgaaaaggactttgaaagttgaaattgttaaacattgaaatggattatcttaggaaagtgtggatcttattttgtagggacctttatttggtatagtttaagttgtgcatatttaaggcaagagaattaacaaaacaatcgcgtagatttttccaaatctgtgacttgaaggatgctacatacagcttccactgcccttcgcgtttctctccgaaacacatttagtaagcagaagtccgtatgcacgtgtgtgtgtattcatataggcctggatgtgcttttaatcccgcaagtatagccatctacagtgaattcagcatcttttcatcaggatgatgcctttacatcatgggtgtccaaccttttatatttcaaaacagattgacaaaatcctagcagggcacagtggttcatacctgtaatcccagcactttgggaggccgaggcaggcagctcacttgagctcaggagttcgagactagcctgggcaacatggcaaaacagtctctatcaaaaatacaaaaaattagctgggcatggtggcatgtgcctatggtcccagctactcgggaggctgaggtggaaggatcgcttgagcctgggaggtggaggttgcagtgagcagagatcgtgcaactgcacttcagcctgggtgacagagtgagaccccatctcaaggaaaaaaaaaaaaggaaaagaaaaacaaccaaaatcttgtacaaactgcacacaacagatacatttgagttaatttttatgtataataaaggcaaccagtaaatagattaaggctggtttgatgaacataaaacaccttagcttttgcttcgaaaatagtgacaaacttactaaaagttgcaaaaagtaaaatagcatagagaattctggtatatcctttactcagatttgcctattgtaaacattttactcacttgctttagcatttgtgtgcactgcgtgtgtgtgtctttctctatacacacaaacagtatttttcgaaggatttgtaactaggttacatatgtcatgactgtttacccctaaatacttcagtgtgtatttcctaaaggtacagatattttattatgtgactatagtacagtcactaacttgataaatttacattgatttaatagtctaccatccttgttccaattctgtcagttaacctaatatgtcctttatgacatttcccccctccactataggatccattctggagccagttatttcatttcatttttatgtctcttcagcctcctttagtctggagcatttccatagtttgtctgtctcttatgccattaacatctttaaagaatacggtcctccctctgcctctctctttctttttttttgttaaaaaaagaacattcaatttttattttattatttagttaatttatgtattattatttatttattttgagataggatattgctctctcccaggctggagcacagtggcatgaacatggcttactgtagccatgaccttcccggctcaagtgatcctcccacctcggcctcccaagtcactgggactgcaggcatgttccaccacacccagctactttttctgttttctgtagagatggggtctcagtatgttgcccaggctgatttcaaactcctgggctcaagtgatcctcttgcctcagtctcccaaagtgctgggattacaggtgcaagccaccaagcccggctgactttttttctgcaataggacagtcttcattgtgtgtttgtctgatgtttgcttcagtgtgaagagattaaggttctgcaccctcagccagaatgcacaggtgctgtggggtccttctcagagcatcacatctcgaggtacatctgatgccctcatcggatgcctgtctgccccttgttgggaatgttaattttgagcactcggtctaggtgttgcctaatttttccattatagaatgactgctttcttcctccccttgtaactaagatgctatctctggggagaaactttaagactgtacaaacactctgctcctcatcaaaatgtccacctagacttagcatccattcatgattctcgcctgttccaatttttacctaatgtttgcaaagtgaggatgttttagcttcagcaccctttccacacttatcagttcatctgtagccctggtaaacaagacagccctccctcatctcctctctgtctccctatctatctatctatctatctatctatctatctatctatctatctatctatctaaattcatgaattcctgtttttaaatcgtttgtacatggttttcatgctaaatcattttggtgctcagattgtaccagctttggctaggggagccccttcaaggtggctcacatgtccccctgctctgccccatccttgattggagcatttccttacattctggcctagaggactatcccaggccagtactgcccttaaacccaggcgagctcctggtccagcatctcaggacactgagtgctttaaaaccaccatcctcataattttcaaagtcctcctctggctcctggcactcaccagggccagcagtatcacctggctagggtgccctgtctcccctttggggtacttctccgacttcactctctcctctccttatttctttcatggggtcactcaagattgggctaccagaatgtgctgacacgcttatttggggtgattctcattcatttggacccatgattcattcagagctttgggctatctgctgtcttggctctcgcacttgagtccctgtgtgcctcgggatcaggacccaaccgtccgtgttctgctctacagcacgtgggcctcaccatttcagccaagggctggtgagacccttgctctgttctcagagttggccaaactgcaaggcctaggggaaaagtcttaaaaggctgccctcacttctgacactatttgcaagtttagggtgtcctaaaaccaccctcagttctaatgattcactaaaagggctcactgaacttattgaaagctgttatacttggtcgtggtttataaagaggaaaaggcacagattatcatcagccaaggggagcgacatgcaggcatcatctgggaggggtttgaatgcagagccctggctgtcctctccccatggagtcatggacagtgctgccttcccttggccacagtgtgtgccaatacagactgaggatttccagccatggaggctcgccctgagccttgggtgcccacagcttttactggggcttgtgcctgtaagactgacctttagtctccaacttttcccagaggtcaggctaatacgtttagtctacttttagtctctagtccctccagaggttaggactgatatggagaggcccaaagtctctctcataaattacatatttggactgtctggcagtcaaagcacccaggcaaacacaaatactcccttctggcaggacgtaccagggttatcctggatatcacttcccagtagctgacggcaaaggccagatctcaacttgggtaaggtaaattctccttccattctgtcctctcttgccctctggtaagtctgaagctatcatagaagagagatcagcatttcctgcctaagtgacactgcccttctcacaccacccatgagcctctcatgtttccttcgtgctgttggtggtctctgcaaggcaagggtgtagccaatactgaaagagtgcaaagtccaggaatgcagtgattcaggcctaaggaggtcaagaaaagacatggttggaagacacgccattctacttttaggctataaaattcagatggtaaatttaacatgtgcagaatgcaagtagtagtttacatttttctgcatcctttaggcatttgagaacatcatcaacaaagcacagaacaacatttgattgagtcaccagaagccagcattcacaggtggctcagtggatgatacaacatccaatgtgagtaaatggtaccagggaactgcagaggcaagagctctatcgtttcaatactaacaggatatgaagaaccatggcattatgagtagcaagagttgctcccttttctctgatacaaatttagccagggatggcacttttgacaataaagaacccgaagagacagtgcctggaccctaggaaggatcttcatgggtacagtttgaacaatgaacgtaggtaggaagctcttctctatcagtctaaagacattgctatcccttacctgatctcatgaattttgcaatacatttttaatcaaatattttatatggacagagagtttacagaaactatttgtctggtgtcccacacatgtgggggtagctgcattcttgacccatcttgtaccccagtcctgcaatcaggcttttctccatgaagcctggttcgtgctatcagagaccaagctctaggtattaggtgaacttggtgaacacaaaactttgaacttaggagtcataggtaatatgaccacatgatcattgtggtcttatatcattgtctgtaatgaataattgtcattttgggcagtctagcatgtgaccttctcttcctcctgctagtactccagctgctgtggggtatccctgttgtgtacagtcagagggaagtggtgactctatcactatgggaatgaacggggctacatgctccttctccttactctaacagactgtctaacagactctcctcactctaacagccacagccagttggaagctttcccctaggaatttcagtgttgagccagtatcacagaaatgtgggtaacaggaggtgaacccagtggcaatcgtgtgcagtagaattgttgcttgtgttcctactgcctcaccctctgagcccttttggtttctgaccatttcccaagattcttttcatctattacctgttgattttctaagcccccagtattaatgcaataaatgtccaaaatctttttgtgtaagacagtactggttttgttccttaaaacaatgaatcctatctgaatcagcatagtatttatttctgggttttggttttggttttagttttggttctgtctttgcttgtttggtatcaagaatatctctattcacttagttaaatgttcgcaagtggtaataatttaacagcttgtcttgcaatctcaggatgtacttcaagtcctcccgaagcttaagagtagagttacaggaaatttccatttcaaagtcaaagcatgtagagtatctaccaacagctcagaatccttaactggtgattgtttaattttgagggtgttaataaacagctttcccagccacttaaaattttttctgtttttagaaaatactttccaaatacatcttataacaatatgaaatgttcagtggcataaataaaaataagttcaaaaatctcattgctcatttctgacacatgtattcaaagtttcaaaacagccaagtttattttgctttgcaaaagaaactttaattaagttaatttaaagcaaaagaagttttaaacaaagtgaagggataaacttcatgtcattttcctcattggtgcattatctgcatttataagcatagtaataaagagactgaggtcagcaccaaacagattagccttttggcacaggtaacacattgcagtctccattattatgtacatttgtatgcgtcgcattgtcgtgtatataagtatgtgtttttacagttctaaaaaatagttattaaaaaaatggaaaaggccgggtgcggtggttcacacctgtaatcccagcactttgggagaccgaggcgggcagatcacctgaggtcaagagtttgagaccagcctggccaacttggtgaaaccctgtctctactaaaaatacaaaaattagccaggcatggttgtgggtgcctgtaatcccagctactcaggaggctgaggcaggagaatcacttgagcctgggaggcagaggttgcagtgagcagagattgcgccattgcactccagcctgggtgacaagagtgaaactccgtctcaaaaaaaaaaaaaaaaaaaaggcagaaaaccaaactaacaacaaccaaaaaaacaaataaaattaaattaaaattaaaataaattataaaatggaaaaaataatatttgaattattggcctctatgcagaatccttaaaaatctgctggaaaccacatccctgctggtaatgttctgcttctcctgtttaatttttaaaattgtgctattctaggcttggagaaagtcccacttccttgctgacatcttctctatgcccaggctagagggaaccttctctctttaataatctcttaaagtgattattttcctttcatggcagaaaaagaggcaagacatgcccttctttgactgttcatcattttgacttgtgatgtatttattttagtttattgtcaactatgtataagccttgttttcccaaattaaaatgcattttatgctcctcaaaggcgtgagccagaccctatacaaatatttgccacttgatcagtatcaaattctacttttgcccttcagacccatttttatctacttagtactgtgttttccaaacatgtcacctgctaccttttaccaattttgccttatcttcataccacgtgtgctatttttactagacacctttttattgcaaataaactcattttttaatctaaattaattcctttaaaaggaagctttcaataaatggaaaaccagtattgtttgccacaaatggaaagtaacataaaaataaatatattaaatacattaaaaaaataagcacaacaacactgttacttattggcctttataaagccagctactattgcctttgggttttgagcctaaggaaaaaagggagatcagagagtgttacagaaattcttccttagctaatcagagaggtttggaaagagcgttcgaaagggaatacctttctttctcagcatgggattcaatgttatctgcattatccatacctaactcagaccgccctggtattatgggtggcagatactcgatgaaaagcactcatagaatatgagctctcggagcctgagaaacatgtcctgtactcagcattcttgctctgtgcatctacacaactcattctccaagagcttccctgctctcccttgcatatctcttcatgatctgggccttatttttcttttcttttctttttttttttctcagctcactgcaacctccaactccctggttcaagccattctcctgcctcagcctcccgagtaggtgagactacacgtgcacaccaacatgcccggctaatttttgtatttttagtagaaatggggtttcaccatgtcggccaggatggtctccatctcctgaccttgtgatccacccacctcggcctcccaaagtgctaggattacaggcgtgggccactgtacccagtcacttctcttatctataaaataagagaattctactggatgccttttccagtggcttccagccctgaccttatcagggtctgtaatcacaagatcactggggttaagcattccagacccctgtttaccactaaccatccagcattagatcacttgccagtgttcaccacggaagctggattggtggctcattcttctaatcccagctactcaggaggctgaggcaggaggatcacttgatcctaggagtttgaagctgcagtgagctatgatcataaatgtcaccctccagcctgggtaacagaaacagtattcagcactggctcactcatcttcaccgtggaagatgacactaccctgtcccttcccaaaggaccaaagttaagcactggaaagatcctttttccttatgacaggcaaagtgctcagggaatatagtggggtttgagcttggttctacccccagaattgccactgttctcccaagtgccaatgacttctgatactctgcacatttaatttccataaagggaagggaatcacagacaagctaaatgtattttagcgtgtaatcccagtttaagttagttaaacggcaactgagctataaaatttgctgaaatcattttttatatatatatatatatatatatatatatatttttttttttttttagacagattctcactctgttgctcaggttggagtgcagtggcacgatcacagctcactgccacctccacctaccatgctcaagtgatcctcccacctcagcctcctgagtagctgggactacaggtgagtgccaccaattccagctagtttgtctttttctgtattttttgtagcaacagggtttcaccatgttgcccaggttgatcttgaactcctggaactcctgggctcaagagatttgtcggccttggcctgccaaagtgctagcattacaggtgagagccaccacacctgtccaccagaaataattttttaaaaacagaatgtcagggaccagtaggacgagtgggagtaagaataggcggattgtattgctgcgggtcctccccacttccggcaacatgaacttcttgaagtgccagcttccttatccttccttgagggatttgggctttgctagattttcattttctctcctagcaattaccttaaatatttacagaaactcttggatctgagaaaaaaacttaggaatcaaatttgtatttggtcttgaaaccactaagtaatacaaaatgcaaataggagttaagatttggaaactggcctttatagagcagttcaaaaaagtcttatgggatttacattttaaaaatgagaatttcttataaaatgagagaatagttgggcacagtggctcacacctatcatcccagcactttgggaagccaaaggggggaggatcacttgagcccaggtgttcaagaccagcctaagcaacatagaccctgtctctataatttaaaaaaaaaaaaaaaagaaaaatgagagaacatatacttcttcaacatgattcatattaatatataaagttatcattttaatgtaatgttatctccaaacaaatatctcatatttcattccaagcaatattaataagaatgtttgcctgcaaatatatattgaaaaaccattgactgacaaaatattgacaacacataatacttaattaagcctgtaagcttgtttgagaatgtgtcatatttcaaaactgaacagttaggccaagtcacctggtgagtcttttgtttctttaaaattcagccatgatacaagggttacctacagaatttagagacaaactccaaaactaacatgctcatcatcctaggaacattgtcatgtttcagcaagaagcaaacccctggaactcttacactaaacaagcttctggtgacaggtgaagctggggtttctctttagccactcctaccattatgggacctgcaagtccaggcttgtactggcgaatctcatgttacaatcactattcaagaaggtggttagaaaagagcagagggtatggttttatctaagtaaaatttattcctgcacaggaacaagctcaggtccacctaagaaatgaaacagccattttttttcaacagacttcttttttgtgtgaactcaaactaagacaatcctctgttctttcttgtagccatcaagccaattaattagagccaaaaaactgataagaactctgtgtactttctctccacttgaaggaaaccatacaaaaatatgtacaatctcgttcactcagaccagcgttgggtagaaatttctttgctctatctataccaacaaggtttgctaagcaaactaataaggtaaacagcacagaggaaggggagggggaagaaatattaactactaagagaagcaacttttaaccactttaaagcacgttcaaacaatctacttccttaagaaatcattagcacaccaatgtctttgttcattaaaggagatgaattatggaattattattctaattactaaagaactcttccctttaccaaaaatttatgcaaagttcctagagagacatgacatttgaatggaattcaagttatcaactttgagctacacacaatggatgatgaatctagtttagatactgagtgacaggctcatgcattttagatgagatggcaaattgccattcgggatattaaaaagcttctagaaatgatacaatgtctgggatttccttcaaagtaatctggtgggaaggagaggtggaaagaaggggatatttaaagataaataagattggccatgagttgatcaacactgaagctgatgatgaatacttgagggctcattatactatactctatatttctaaaaattgtccacaagaaaacatttagaaatttagaaatgaaagaatgaaagaaagaaagaaagaaaaagaaaagaaggaaggaagaaagcaaaagaaagaaagaaagaaaaagaaagaaagaaagaaagagaaagaaagaaagaaaaagaaagaaagagactgagaaccatggctcacgcccgtaatcccagcactttgggaagccaaggtgggaggatcccttgaagccaagagtttgagaccagcctcagcaatgtagtgagaccctgtctctatcaaaaaaataaataaataaaattaaaaattaggccagtgtggtggtgtgcacctttagtgccagctagttgggaggcgaggtagaaggatcacttttccaggctgcagtgagctgtgattgtgctattgctcttcagcctgggtgacagagcaagaccttgtctctaaaaaggaaaggaaagaaaataatccacagacggcaaatagacaagtggtcaggaaactggtagggattgcagggatgcagacagtgctatggctgaagggaaagctcggggaagagggagtagaaggccagcagggcaggtgtgggcctgtctggggtcctctccttgtgttgtggcttgcatttttgtccctccatagcagcaggaaggaacagaaaatgcctgccagagcctgccctgggtccaattctgatgaaggcaaaagctgcctgcagtgctccgaatatgctcagcctctgcctctacctccccaccagcaaggccgtgttttcctccacgcacacctcgagcacaccgctttatcaaaccccattcagaaacactctgtgttcccagcactgatgttttttaaaaatggtgacagtgacttcctcatttgcatttcgtgtttatgaccttctcctgttggcttgacatatagacgtggggcagggcaggagtgcagattagagcagtgctgatattacaatgagagagcaaagacagaagaagagatcgcgttcagcttctggcatttaaaagaggattttgcccagggatctagtgtgacaagccagctttgttgagatttaaaagctatgtaatcatgattcacagtttctttttatctcctcccagagactaccaagagccaggcctggccacctgcactgtggagttttaggttagagatggccccatccagcccaggggaatgcaggagaacaagggagccaggcgaatgcagaggggaaggcaggcgctcagcttctcatcttccctccctgccccctcaaggagtcagttggaggcagctttggaaatacctacaaatgtgctaaaaagctggaaggcagagaggcatctgtcctgcctcctgtccatggctctaggctgcctctctccaccaagctggaggtagctccatcaaagtggaagcagcagtacaataggactaagccgatggaggaaggatggcgttccacgtggtgaacctggaaggtcccacctgaatctgaggctttagggaactgagaagacagctggcatgaggctcagtggctggccataggccttgcaatggccaggggtgaggggacctcctagccaagggcaggtggaggaggcagcagaaactcagccaggtccatggtgaaggtaaaaggagaagttaggcttggctgaagcataggcatcaagcaaccagcctggatgaagctgagacagcagtgggtcagttcctagagctgtgatggccagcagacaggcagaagcaggggagcaaggagcagaggctgggggagttggggggttccacccagatccacctcctttccccagcacctcaagggtttctgatccaaacacgaagtaccttcctggaaagaaaaagaagggagagggaggagagcaagggggatggaagagaagacaaaggaggaaagggaaatggaagagagaaaggaatgtttctgtgatgctcatcatttttatataaagaagctgttacaattattgcatcatacttagatcaacagattaatctggagctgttaatattttttgttatgcagtaagtgggtctcttgaggaaggccgtacattttacattttatctgaacatccgggtgtagcatcagtgactgggatcctgcacatagattttctgtgaatttgactgcagttgttgccccttgcagacatttcagctttataactgaggaaagaacagctgtgaccactggggccccagacaccctgctcttgctaactatctcctctggggtgcagggtgctgtgtctcacagttacagccccccaggaatagactgactacccaccacacatgccactgatgcgactctagcatccgctttgtctggatctcacctactgccccttcatcctcaatggatctaaaggctccccttaccatgaccatgtcacagctaacatggactgccacctgcaaagtgtcagtcataggaccaaatgctttgcaacatcatcgtcatcatcatcaccatcatcatcatcatttttaatcctcacatttaccttagataccaataatatcaacattttccaaatggggaaattaaggcttagagagtttaaacagcttgaccccaagtaggaagtgacagagctgggctttgaatccaggtcattcagctttagatcccataaatgttagcagcttccacaggctatgctgccactaggcaatttggggcttaggtcggccagtggctctgtcttcctgtgcttggaacccgggctcgggcagcccctttgtccaggaacgtgacctgctgcccacccagctgctctcttgtcccacagcactcgttgtagaggtccctgcacggccttccatgataccccttcttcttcacctcacatgcatcactcagacctctgacatcacctccttgttggtagagctttctgtgactccttatggcagcaagtcattccctcctgcatgttcccttgccactgagcctgtaggcagtgcatttcccatggaaacataatggcatatttataggccagtcacctgagctgaactaggagctcctcgcagacaggtgaatgccatcttcatctgtgagtttctagactggagaggatgcggcagagaccatgggctgctttgcttaaggctcatccaacccctgaccagcttgtctttcagtacagcagaggccaagaagcagaaaatgacaggtgaagccaggtcccatgtgtagtttagttcctgccaatcaaaagcattcatgcgagactgattacagactgagctatgaagggcaaaaggcaagggccaaggcattcattttgctggagtggatcttggtttttaaactgtcacagcaatctcctcagtcagacagatctatatagtgtgtagtctatttatatttgtaatgaaaaaaaaagaataaatgtaacaaaactgccctcttaaaggttgtttgttaataacctccaagactcaatttcaatttccatccacttggtctgttaaccatgactctctcactttttcaaagataccaggctttgcattgcctcatatttagatcagaaattcttttaaatttgtcaaggattccagctgttagaaagagagtgggaaatagcaatggagaaagacaatgtaatcaaaaggaaggattactgctgggcagcaaaatccaaaaatgtccactgaaaggttgggcattgttgctcatgcctgtaatcccagcatttcagaggccgaggtgggaggatcacttgaggccagaagtttgagaccagcatgggcaacatagggagacattgtctctacaacaaaagctaaagagctagctggacatagtggcacacgcctgtagtcccagctacatgggaggctgagacagaaggattgcttgagcccaacaggtcaagactacagtgagctatgatcttgccacttgcattccagcctggaagactgaatgatatcaagaaagaaagaaaagaaaaagaaaaagaaaaagaaaaagaaatcaactgaatccctcaaatcaaaccaaagaggcaggaatccaggcttgcatgcagcactcggccttatcttttacttgtatattctttattacgtatctctccacttctaggattctgcgcacctacaatatctctgatgtaccagaaaactgtaaaatgcacaggaaagcccctttggggagcagagtgaagagtgagtaggaagtcctggtagaattttaccagcgaggcaaagggaggctcagtgattgattggagatctagtgagctggcagccaaacctcaggcaagtctcctgacacctgctccattgttcctttactgtgttctttataattgacttctcagtaagagttgacaatggccatagcaggtaccctagaaccaaaaagctgagtctcatgaaatcctgcccagctccaggggcagtcagatggggactgggaatgatagaggatggaaagtttttcatctcaagggttttggtgcatcgtgatgggcagtggtgcggaggacgcatcaacagttgaacgaaactttgtttaagaattgtgtaggctgaaagtgattggtgcttgacagtgctttacccactgctaaaaacaaagtcttaattttgaggtggtgccaacagtttgctccactaggatggcagggagcttccttcggtttaaatatttacattgcattttcagcaccactctcagccttactgtagcaggcaaccacttagtgggtgtttgaagatgacaatgccccacgctcagcccttctttagcgttaatggacaagagcaagctgtatgtcttcttaaataaaacagcagccttttgtgacctcccttttctcaggcaacaccaactcaattattcactcagaactgcaaggaacacttcagacgttactcaagcattcatcatccacccccacccccacaaatcatataaagggaaaataatcaaagacatttaaataatcacaatttttaaaagtataaagcagaacagacagttttattttagatcttaagtgaaagtggattaaggttttccttagaaaacatttattggagaatttcagatgaatttcagttttgccgcctggtgtcgaatcctgctttttaaaccttgtctctgcagagtcacccctttttctccagtcccactctcactgctgttggtctgaccctgtatgtctgtgattggatagacagcaactgtccctaggaaaggcatagcatgggaaagtgtggatgtctcagtgtccctcctgagattcactctatgacaatgactgcatagccaccatcatggccaaaccacacccatcctgcaacacccagcctcttcccaggccctcccgttagcacttggtgctacccattctccgttcatggcttccccattgcctgggtctttgctccaaggtctttgcttttctcaccaagggctttgcttttcttaggtgcatccacattttaaaagcaggattcttatccaaaggaataaaagggaactatccagaaatgtattgaattatagaagtaatgagttggtataaaaacaaaagttcaaatgttgtaagagctcttgtataaaaataaaatgccctcctccctttgcccctcccagtctcactccttaggcagctattaatacttttgaccattcttttttttttgacctgcccctggagctgggcagaatttcatgagactcagctttttggttctggggcacctgctatggccattgtcaactcttactgagaagtcagttataaagaacacagtaaaggaacaatggtgttcctttgcaggtgtcaggagacttgtctgaggtttggctgccaactcactagatctccaaacaatcactgagcctccctttatacatatccctcatacaatatcataattgtataatataaatacaagtaataactctaaataatatgatatgccctatttcttgatttctctctttaaatagtatctatccactttttaccatgaaactgaagagtttggttcatcttctcccttttccctccctcgtcaaatttttgtttattatatttttatctcttggtccttctatgagtcaactataaaaataaataaagaccaatcacatgagaaaagcaaaggctatttattctgagcttgctgtagcaagggagtcagccacccaccgtcacttacattttggcagagactcaaaggcaggcagaggagtaggaaagctttagattagagaacaaggaaggcttcagctatggtcggattgaaggctgctggcatgcggaagctataggtggactaagtagaagtagggtatcctatgtgattagttaggggtgcgtatttggcttcctctggttggtcctaagttggaagcagggataaaaatttaggaagctgtcagttattaaacaagtcctggccatttggggctgacttaggctggctggattgtttatggtagaaaagggcattggtttcctgggcaggttgctgccgatcgtgggtcaaagttcatctacatatatatggcctggccattgcctgcttggctattcagtctctcacgacttcataactttaaacaatagagttaaacttctatttcgtgatcttccaaatgtaaacagtgtttctttctccccattctgtaagatacccacccccaccaccagctaatctccctccctctacctcccagcttcttccagctataccattatttttatatatgaaaagttgtaatcatactatccctttggcatgtgtaaatattccatgatgtgtctataggtcaattttgaaaatcaagagccagtaagcagcatttacaatatcataattgtatactataaatataagtaataacaattttttaaattttattttattttaagttctgggacacatgtgcaggatgtgtgggtttgttacgtaggtaaatgtttcacggtggcttgctgcacctgccaacccatcacctaggcattaagccccgcatgtgttagtaataagataattaaatgatataagtatgatttactagttgaaaaaagtaatgagatttcatccataattgaacttagtgaaagaaattttatatctgtaagcctgtaccactggaagcataatattttaaacatcaatgtaaagttggttctcctttattatacatttttttttctcaaaggcctacatgtcagataaactttcttggtcttgaatatctgaaaatgtcagcgtttctatttcacatctgattgatagtctggctggatacttaattctaagttccaggtgtaggactttgaagacattgcttggttgacatctactatccaacattgtggatcaagtcatctgatatcaatctcattttcatttttttataagtaattcatgtttttctttctagaagctctcaggattgtctttttatcctgttgttctagaatttcaagtggatgtatcctatgggctaaatatttgtgtccacccacctcaccccaagttcatatgtggaaaccctaatgcccaatgggacacaatttggacatagtatttgggaggtaattaggtctttcaggttaagtcctccttaggggattaaggcccttattagaaaagacatcggagagcttgctcccctgctctctgccgtctgccatgtgaggaatcagcgagaaggcagctgtctatgaactagaaggaagaccttcaccaggagctgaccatgctggcaccctaagctcagacttcatgaactgtgagaaatacatgtttgttttttaagccacccagtctttggtattcaattatagcatcccaaattggcaaagacaaggtgtctagaaaattattttggataaagccctgaaatcctcccaccagttattccacctgtgactgaggttggctctctcaccagcattgctataatctcttcccctcagacaaggaatcttcaggtattaattggcaagcttgtcttccaaccccacgcttcgactatgccaatcctattttaagtaactctttgagagacagcttgttatatcagaaggagaaccccatgtgatctcgagggaaggttattcaacctcccaaaacctcaattttattatccattggatcagcggtccccaacctttttggcaccagggagtggttttgcggaagacgatttttccaccgatgggatggcgagggaatgatggttcatggatgaaactgttccaactcagatcatcaggcattagttagattctcatgaggagcacataacctagattcctcacatgtgcagttcacaatagagttcgagctcctgagactctaatgctgctgctgatctctcaggaggcagagctcaggcagtaatgctcactcaccccactgctcacctcctgctatgcagacaggttcgtaacggaccacgggccagtactggtccatggctcaggggctgggactcctgtgttagatggacataacagtactacctcttaagatgtttgtgaagcataaattagagtaaaatgtgaatacaactcacctgccacaaatgataggagttattaggagctaacgaagtgagacaacatatatatatataatgattgtaactgtggcgtgtgtgtgtgtgtgtgtaataaatgtttgtaaactaccatcatataatcattccccaaaacaatgtacttataagaagaaaacctggccttgtccctacataaatggaagaaaacaaatacagcatttttaaagtgtagaagaagcttattagagtggttttcaaaaacataaatgaggccaggcatggtggctcatgcttgaaatcccagcattttgggaggccaagttgggaggattgcttgagcccaggaggtcaaggcggcagtgagccatgatagcaccaccgcactccagcctgggtaatgaagcaagactgtctcaaacacacacacaaacacacacacagacacatgaagattgtggagctccaaagtagatataaatggacaacagaaccacatacaggctaagccacagaaactactatctgggccaagtgtgagcaggtagtgtctgggagggtgtgtggaccctctctgggaaaaaacaagtgcaagaagatgagggaatggggcgttgagaaagaaagtgacctgggagagcaataacaacttctaagctgacaacagctaagatagggaacatagcatgtttgtgtatgcacgtgtgtgtgtgtttatcagtatgtcataggccatgtcaaggaaggagagaaagaaaatagcaataaaagtagaatgcagtaaaataaatgatggcagataaaatatgaaatagatttggtgtttttgaaacatcatcaacaaaaaaaaatgactagtagcctctaaacattttgtgtaaaggaacattttcaggccaggcacagtggtccaagcctgtaatctcaacactttgagaggctgaggtgggcagatcacctcaggtcaggagttcgagaccaacctggccaacatggtgaaaccccatctctactaaaaatacaaaattagccaggcatggtggcacatgcctgtaatcctagctgcttgggaggctgaggcaggagaatcgcttgaatctgggaggtggagtttacaatgaaccaagatcgcaccactgcactccagcctgggcaacagagtgagactgtcaaaaaaaaaaaagaaaaaaggaacattttcagcatatacagaattatagagaacagttcaccacatatattcaccgctcagcttcaaaaactatcaactcatgtcctgtgtcagccatcatccaatatttggtcttttgtgactggtttcttttacttaatttaatgttattgaggttcatccatatcgtagcctgtatctgcattttattccattttaattggtgaatagtattccattgtatggagctaccaaattctgtttatccattcatcacttgatagatctttgggctgtgcctggtgtttggctattatgaataatgctgctatgcacattcatgtctaagtctttcctgtggacatatgttttcatttctcttgggtggattttttgggtggattcttgggtagatttgttgagtatgtttgtgtttaacatttcaacaagctgtcatgctgttttccaaagtgactgtactcttcaatattcctgccagccatctatgagggttgtagtttctctctgcgcactttgcattctctcttttattgtagccatcctagagcgtgcaaagtggtatctcaatgtggttttaactttcatgtttctaataaccaatgatgttgagcatatcttaatgtgctgattagccattcctaggctgtccttggtgaaatgttcactcaaggatttgggccatttttaattgagttgattgtcttcttattgagttatggaagttctttttagactcttgatacaagtcctttatcagatatatgatgtgcaaatattttctcccagccagtggtccattttcttcatattttttgaagtcaaagtttttaaattaattcaacttcaatttatcaatttttttatggctcatgcttttaatgctgaatccaaggatcctttgcctaaagcaaggtcacaaagatttcctatgcttttttctagaattttttacttttagcttttacgttttgggctattatcctttgtgtatgatggaggtacttttttgtcgttgttgttggcatatggatatataattgtgccatttgctgaaaagaaatcccatggaaatgttttgacacctttgtcaaaaatcaatcaaccataaatgccatgaatgcaaggatttatttccagactctaatctgtttcattgacctatttgtctgtctttacataaataccacactgtcttaattaacagggctttgtagtaacttttgaaatggggcagtatggctgggcacggtgggtcaagcctgtaatcccagcactttgggaggccgaggcgggcagatcatgaggtcaggagttcgagatcagcctggccaatatggtgaaaccctgtctctactaaaaatacaaaaattagccaggcgtggtggcagaaacctgtaatctcagctactcgggaggctgaggcaggagaattgtttgaacccgggaggcagaggttgcaatgagccgagatcgcgccattgcactccagcctgggcgacagagcaagattctgactcaaaaaaaaagaaaaaagaaatggagtactagaagtcctctaatatttttttttccaaaattgttttgtgataaagtgatcatttataccagaatttcaacttgcttttaaaacgtggatgccttctctgagacaagcactgtgtctatcatgattgtaattcagtctattacctcaggcagagacatgcatgttcacaaatagcacagccctggttcagccctaaatttcaattgcacacaagtcatacatacaagatgccatggcagacagggctaagaacaactcaatttgctggagttcatttcaggagacttcacgtaggagatggtggctgagaggggccttgaaaaatgggtcagcttcattaagatgagctgaagaaactgatccagggctgggaaggaaatgggtagaggtagcagggcttgaaagcagatcagagaggggtaattttggagaagtggctagagggagaacgcaaggctggaaaagtgaggtgtgcacctcaggctcagaaacctcaggcaatatttggagcagctgagggaagcaggggcccaagggggtaaaaaggcagccaggccattttcctgctctatgcaaaggatacagtcttgccaggtgcagtggctcatgcttataatcccagcactttggaagactgaggtgggaggattgcttgagcccaggagttcaagaccagcctgggcaacgtagtaagactccatctctaaaaaaaatacgaaaattcgccaggtatggtggcacacgcctgtagtcccagctactcgggaggctgaggcaggaggatctcttgagcccaggagttggaggctgcagcgagctatgatcgcctcactgtactccagcctgggtgacagggtgagacactgtcaaacaaaacaaaacaaaacaaaacccacagtctttccccgaatcctgttcaatcctctcaaagaacactctattctggtaggaaaggtacgaggagggagcgtgagccacccacacaaatcttctgctcctacaggaagaataaataaaaccctaccgatgtgagtcgccaataccatcttcagccataaatgacgaagcatttttattgttctttaccctgtatgcttgaaacctggcaggtctgaggattaacatgagccactgtcctgccggagcagaggatgatctttgcaccaccctggcaactcctattaaaggctcaaagcttatgcccttttcttgctccttttccaagttggctgggtgtttttaaaaacttgcctttgcctctagagccttcctatcagccactggtatgggccaaaatgaccaccataagtgtgatgtcccctttttgctaaattttcagactctaatctaaaatggaattgatttgtgtaatgtctgaacccttgagactatttctgcttggaatggaaattgactccattcatgtttcaggagtggcaggctcccagaaatccaacagtgtcttcatcatagattcctgccaacatggttctgcctaataaatatgaacccaggtactggagaccattgatccccatttcagccttctgagagtctcagaacatatgcacaagcaaagcacccacattctggtggctctgggtgcattgtgttgagaagggatttgagtgagatgtgtagggagaggaagcggggcaatgccagagaaatcctttctccatttttatcagatctgctaccttttgctcccttggagattctgagtagatatagttaagaatttttgagtgacaagagttattgatacacatggtcaattggccaacacacagccatgccaacctctttctctcatgagtgacatcctgtagcaaagctgaagaagtgagattcttccttacccagccttccttgcagctaaagacagctatgtgacccagttctagccaatgacatataagaggaagggtgacagaatcttttgcaaaaatgttttctttacaaatgaaagaaaagaggcatttgaggacaagttattttattgttagtttgtgcccctctcccactacttcctgtctcggaattctgttgcaatgtctgaagctgtagtagccattctgtaatcatgaggcctcaagcacaaagatgaaaaaccagcacacagaagatggtggagaaggaaagatagaaagagccccgctctttgatgccatccctgacctgctagtccagcgctagtctggattcctccagacttcttgtttggtcaaataacaagatgccatcattgtttaagccatggttaacagagttttctatggctggcagccaaatatattcaagatagtgtagattctactactttctctcccctaacctctggaagttgcctttacttacactaaaatgtacagaactctcctggttcctgcccagaaaatcaatttattaaaaagagtagctggacttccagtaaaatgctgtagcaatagatgactattagatggaggatgatatagtgatggtagtgggaagggcaggtgcatggctcagggcctctgtgtgataagcagcccttgccttgccctgactgtttcatgagagatacaggaagaccagtgttttcttttttcttttttttttttttttggtccctctctggttaatgagtgggtttaatagtgactacccggaaatatataccccatgcagagctgaagatcaatattactagagggaagggaagaggagtgaggaaggaagggaggagacaaggaaaggaggaaggacaggaggagggagggaggaaggtgataggttcaatacaaacttgaagatatgggggatagcaggggatagaagagttctggagcaacaaacaataccaggattaaaatcagaagctgaggagcaaaatttggctgatgtggtagttgaaagcagccacatgaaggggcaggagggctgtctgaagtgaaatttgtcccgcggggtttgaggatgagaataaaacaatgtctttttttctttttttgaaacagagtcttgctctgtcacccaggctggagggcagtgacataatcacagctcattgcaacctctgcctcccaggctcaagggattctcatgcctcagcctcccgagtagctgggactacaggcacccacaaccatgcccagctaattttggtatttttagtagagatggggttttgccatgttagccaggctggtctcaaactcctgatctcaggtgatccgcccgcctcggtctcccaaagtcctgtgattacaggcacgagccaccatgcccggccactttattttgatatggacagttgactgatgtctcacatcatgtaagatgatctatatattcagcgtccaaccttcaggcacagctggttttcttggagcaacctgtattccaacctgtatgccagagcttccataacaaaactccacagactgggtggcttaaacaacagaaataaactttctcactgctctggaggctgcaagttcaagagtaaggtatcagccagtttggtttcttctgaggtcactctccttggcttgcagatgaccactttcttgctgtgtcctcacatgctctttcctctgtgcacacacatgtctgtgtcctaatttttgcttcttacaaggtcaccagttgtgttggatgagttgaggtcaccatgtgacctcattttaccttaatgacctctggaaaggccctatctacaaatctagtcacattctgaggtagtgggggtcaggacttaaacatgtgaactggggcaggacacagttcaacccgtaacacccctgtaacaaatcgccacagtgtcttaaagcaacacaaattattctcttacagtcctggagaactgtattagtctgttttcatgctgctgataaagacatacccaagactgggcaatttacgaaagaaagaggtttattggacttacagttccatattgctggggaggccttacaatcacggtggaaggcaagaaggagcaagtcacatcttacgtggatggtggcagggaaagaaagagagcttatgcagggaaactcccatttttaaaaccatcagatcttgtgagacttactcactatcaggagaacagcacaggaaagacccaccctcatgattcatttatctctcactgcatccttcccacaattatggaattatgggagctacaagatgagatttgggtggggacacagagctgaaccatatcaaggacagaagtccaaaattggtttcaccaagccaaaatcaaggtgtcagcagggctgcattgcttctgcaggctctcagggagatctgcttcctggatttttccagctttgagaagtctcctgcattatttggcctgggatccttcctccatttcttaagccagcagtggttggtcaagtttttctcactccgtgttactctaacactccaattctgtagtcaaatctccctctgcctctctcatttaaggacacttgtaaatacatttaaggcccacccacagaacccaacgtaatctgcccacctcaaaatccataatttaatcccatcagcaaagtcattttgccgtaaaataatatattcacaaattctggggattcagaaatgaatacttttggaggccattattcagcctatcatgtgtcataaatccacatctgtactgtgcacactgtgcacactgtagctgtacccctgagctggtcgggtgacaccagagttggtgtcactggtgctttcccaatcacaaagagaagaatctgatgagtgtgtgtcatgttctgggggagtggggctgagactagttaataaactcgattcctctagttctgtaatccccatatgccttgcaaattaagtggtttaaggaactcctttaggtccctagagcccaccaaatggaactctcctgaggaccccagtttaaaaagtaatgaggaaaaacagtgaggacaggggggtttgcttgtccctaaagaatcagtcacacagctcagcagtcgagcagtcacaatggaacaccaagaatgtagcactttgctgagtcagcatctgcaaatctgagctgagctgcttctccagcaaagaccagttcccagggtccaccatccacacacttgtttcaggccctcattcctaggtgtgccccggaccaagggcaagccacatggaatgatcctatatgcatttttatgttgatgaaattgggtgaaaatgagagaagactgggagatgctgaaggtagaggaataggcccgtttgcttttctttgatgatagagaacttttgaaaccaaatgtatatatatcacccccatgtattttttttaaagtctcacctaagagatacctatgatcttttcctattttaaaatattttaagcattaagaaaattttagagaattgattattaaacacaagtacattcagtccagctgtcagactttaacattttgccatatataattcatatctctcttttttaataaataaaatacaacagaagatttttagagtagttacactattctatatgatcctatactaatggatacatgtcatgatgcatttgccaaaacccattgaatgtatgacactaagactgaatgctaatgtaaattatggactttggatgataatgatgagtcaatgtagattcatcagttacaacaaatgtactactctggggcaggatgtagatagtagagaaggctgtgagtacatgggggcagggaatatatgggaaatctctgtaccttctactcaattgttctgtgaacctaaaaatactcaaaaataaactttatttaaaatatatatatagactggtcatggtgggtcacacctataattcgagcactttgggaggccaaggcaggtggatcacttgagctcaggaggtggaggctgcagtaagctaagatcacgccacggcactccagcctgggcaacagagtgagaccctctttcaaaaaaaataagataaaataaaattatatatatttttttatatagtgcacacaaacacatataagacagttgaagtaccttatgtacctttctgtaatatcatattcccccagaagtatttgaatttgaggtttattatcccatttttgtctttataattttaccttatgtataaatatctgtaaagaattaactgtatatatagttttgcatattgttaactttgtttcaatggtacactgtgtgtattcctctaaaactcacttttattgttcagaatttgaaatgtattcatgttgatttattcatttatctttaacagtgatacagcaaacagtgatacagtacttcagcttatttatccacttacctattgagagaaatctagcttgtttctagcttttgtgctatcgccaaccatgctgcaaagaacaatgttgtacgtttctgcttatgctcttaggtgctagcttctctgacatagactcttaggagtggaaatgctgggttgtagaaaatgcacatcttcatcattaaagatgtgaccaaattcctttccaaagtgattgtaccaatttacagtcccactaccagtacatgataatcaccattgctccaccaattcaccagcacttgctgttggcactcattttaatatttaccaatctgttcaaaatagaatggcagttggttttaacaaccattacattgggtattagtgagagtgagcatcattgcatgtatgcattggtcattcatgtttcttctgtaaatttcctgttcttgtcctttgaccatttttccccattgggttgttttcctttttctcattgatttgtgagagttctttatataatttggacattaatcctgtattaattacattcattttaaatattggattctattttaaggcttgtctcttaattttattggtcctttgttgcacagaagctttatctttttatgcattgaattttatcagcattttaaatgtttatttatttatttatttttaataatagaggtgggggtcttactctattgcccaggctgatcttgaacgtctggcctcaagtgatcatcttgcctcagcctcccaaagggctgggattacaagcatgagccaccttgcccagccatgtttatattttttaaggattatttaagaaagccctcttggctagcatatctcaatgatgtccttttaattttgaaatgatttttacttttttcatttagatgttaatctccttggattgattttagtgtagggttagggacctaattgtgttattttccttaaggaaaaccaactgtctcagcatcatttattaatttaaaaaaaatatttctccagtactctttattaattttttgaaatctcccaattactttaatgcactgtctctgccatttgtcaagtggtcagagggagcctatttccatgctgattctgttccattggtctatttgcctgtccctgccatcacgtcttctatttattactgtggctttttaatgtcttagctgatagagcaaatctctctaccttgttcttctacatttgtctttctttttttgacccttgcttttccaaataaattttggagttggtttgttaagttccagagacagaaagattctctgctcggattttaaaattaatttggggaaatttatcaataaattaggggaaatgtgatacctgtacaatactgagtctttgccatactatcttactctttaattttaaattttctttttattaacatgagtccataatccttatctgaaactcttagggtaagcatgtttcagaattcagaaattttcagatttaaaaaaggcaaaaggcaatattatctctgtataatatgttacatattatctcccagtgtcaatgctatttacgattttcctcttattttggttgagcacattctcaggtatagtgctgtgcaatagaagttctgcagtgatagaaatgttctatatctgcgcaatcaaatcaatgctcgggctgggctcagtgctcgcacctgtaatcccaacactctgggaggccgaggtgggtgaatcatttgagcttagaagttcgagatcagcctgaccaaaatggtgaaactccatctctgctaaaaatacaaaaattagctgggcatggtggcatgcacctgtaatcccagctactcgggagactgaggcacgagaatctcttgaacccaggaggtggaggctgcagtgagccaagatctcaccactacactccagcctgggcaacagagcaaggctgtctcaaagcataaatataaaaataaaaataaaaattgatgctcactagccacatgtggctatggagcatttgaaatgtgggtaatgtaactaaggaataaaattttaaattgtgttgaactgtaataaatgtaaatttaaataagcatctgtggcaaatgcctaccatattagacggcacagcactagtagtttccagagaaagggttcatgggagggaatgttttgagtccttacactccaaaaatacatttattctaccctcacacttaattgatggtttggctgagaataaaattctaggttaaaaaataattttaccttaaaattgtgaaggtattgcttcatatctccctagcttccagtattgctttttgcttttttttttttttttttgacagggtctctatcactcccaggctggagtacaatggtgtgatcatagctggctgcagccaggaactcctgggctcaagtgatcctcctgcctcagccactggagtacctaggaccacaccacaggtgcatgccaccacactcagctaatttttctaatttttctgtagagatggggatcttgctatgttgcccaggctggtctcaaactcctgggctcaaatatatctctcaccttggcctcctagagtgctgggattacaagcatgagccactgtgccccacctagtattacttttgagaagtcaaaagaacatcttaattccctgtttgaggattgtgatctgcttttgccctctgaaagttttaaggttttatctttgtcccaagcatttttgggcttcctgatgccatgctttgttgtgggtttattctcattcagtgtccagggcatttggtgggccttttcaatctggaaattcatatccttcagttctgagaaatttccttgaattatctcattgattatttctttcctttgttattttctgttctctttctctagaacttctgttattcaaatggtggacattctgtaccagtcttctaattttcttatatttttctcctctttccatctatttgtttttactgtgcttcctgggaaatttttcaggtatattttcccagactttctattgagtcttaaatttgtgtcttcatatttttaatttctaactggtattatttttgttccccaagagctctctttttataacattttttcttgtttcatggttgcaatattttcttacctctctaagaatattggtagatttttaaatgttttcttctacctgtttcctctttttctgttcatctgcattggtttctacacaactagcttgaggctttccttgacagctggtaatccttggttgtcaactcatatacataagagttggggaaggaaatgttcttagaaagctctgagtatatgtctggggtttggcacccattaacctcactgtggaatgatctggctaaaccatttagttgggaaacctgatgtcatctgtatctttaggtgtttcctccttgcctgttgagattcttcacagccgatggttccaatctcctgccagggaggcattggcctggctgctatttttctgttattccagagaagaacgtggacagaaggcttcagcatccagtgtatatggcttactaagtcctccctcccctttccagttcgatacttctgtacttactccagaaactatcttcagtggaaaaaccttgaatcttctgccagtgtgaggggattgtaggggaagatctatggatctgatttttttttcttttctttttgagacaggctgtcaccttgttgcccaggctggagtgtagtgatgcaaacatggctcactgcagcctccacctcctaggctcaagcaatcctcccatctcaccctcttgagttcctaggaccacaggcatatgccatcatgcctggataattttttaaacttttttgtagagatggagtctcaccaagttgcccaggctggtctcaagctgctgggctcaagcgatcctgccacctcagcctctcaaagtgctgggattacaggtgtgagccaccatgcctggacactgatttttaaacagcctttcagataaacctccttactttagcaatctttttttattccatattctcaaaggtgcctgatgccaccaattttggggttattgggtcatttcttctgtgttacagatcaggtctcaattttctccactgccagctttgaattcagttttttgttttgttttgttttgttttgagacagtctttctctgttgcccaggctggagggcagtggcacgatcttggctcactgcaacctccacctcccaggttcaagagtgaattcagtttttttggctctgctaagccgctttataagcatttctccaattttcaaaatttggaaatttttatcttctattgttatctgttatcttctcttcaatgctcttcatccttatgggtttatgtcttcagaaaacagtctctttattgccatttttgtgaagttttgagaggaagaaaaagtcaatgcatttgtttcccattttgtaaatgccagatggcaaaccagtttcctttcttcctccgccctgcaaaattggctgattccaaagcacagcgtctttaaatgcacaaacattattatttttttttttttgagacggagtctcgctctgtcgcccaggctggagtgcagtggcgggatctcggctcactgcaagctccgcctcccgggttcacgccattctcctgcctcagcctcccaagtagctgggactacaggcgcccgccactacgcccggctaattttttgtatttttagtagagacggggtttcaccgttttagccgggatggtctcgatctcctgacctcgtgatccgcccgcctcggcctcccaaagtgctgggattacaggcgtgagccaccgcgcccggcccaaacattattattaaacagctacaatgggtcagtcctgtgcttgtcactaatcagggacaaatgaatagacattgaataaaaggttgctgccacatgaaagttctaaagcaagacatttaagctgactgtctggagtctcctggctcctgaggtccccctgactcttgtccactatcctatgtggccatgattagctctcctgggatagtagcctgttccaggttctgggctggtagggatcaaacacatttgatctaaatcttatgagcactctgctctgaccaagtgctccaatgaaaaagtatagacttttaattctagctcaccacaaatatttcccacaaacatcaaatgaaagaaaagggcagaagcaaagtatgttaaatataagtctattgagtcactctcattagtcaccctgttttgtttgtttttttcatttcaaaccctatcgaagtgaatggagtcgttcttaaccaaggtaagccatagggtcctaaggacccatcgtgtgtaattaatatgaaatgttgacgattcacttgttgaaatggcatattcaatgtgacataaaatataaatgaacctgaaactacatggattgctgcagactgtaggccactctgaatgggtgctttttgtctgaagtctatttttaatatattttactatatatcaagcaatatttaagcactttacaagtattgtactacctgattcaatctctgtaacattatgagagaagtacaaccagtatcctcattttacatatttaaaaaaccaggcccagaaaggttaagtaactgctcaaggtcacacaattagtaaaagaaagagctggctgggtgcagtggctcatgcctgtaatcccagcactttaggaggctgtgaggtgtgaggcttacttgaagccaggagcttgagaccaggctgggcaacgtagagagaccctgtctctacaaaataatttaaaaatcagctgggtgtggtcgcacatgtgtgtagtctcagctcctcaggagtctgaggtgggaggatcacttgagcccaggaattggaagctgcagtgagtcatgatcatgccaccacactccagccagatgatagagaccctgtgtctaaaaaataaaataaaataaaataaaagagctgagattcaaaccttagcagtctaactccaaagcctagaaatgtatggactcttatgtgcattactctaagctaatagttctcaactggggacaattttgtcacccagggaacctttggcaatgtctggagaaattttcggttgtcacaacttgggggaggggattctacttgcgtctagtgggtagataccagaaatgctgctaaacatcctataatgcccaggatagttccccacaacaaagtgtctggcccaaatgtcagtagtgccaaggatgggagagcatgctggtgtgctagtcactgatgctcttctcccagttttacaagttcttcctccaggcatatggtataatttgcatttcttaaagttggtgtaggcatatatcttgcttgggccaatgtaaagttgctgcacttctagacaaaaattttaaaagccagggcataacaccatgtatccttttttatactttggtcaccttggaagtcttagaaacacagagatgggacttccctctgccttcgtccttatgtgaggataaagcagaagagaaccttaagaatgacccatgacagaagcttcctgaactataaatactgtttgtactaatagttttaagccgttgagatttggaattgtttctgcagcataactcaggctaccccaactgatgaggactccatcctcacataagtacatatgtccctgtctcatgtaacctgactcaggtctttctactcatttcccaggttcctcacaaaggtgaatgatttcctgctgcaaagactgtgaggcatcatttttccaattagaagtgttgctttgtcattggactacatatatctggataccataatgataatggacttgcttcccttttaatttcatggtaagcctctgacagaagttgcatagtagttgttgtcataacaaccatgcaactcagattttccaaattaaagcacatacttgctagtctcactatacctcaactagctctagtgaggtcagaatgactaacatcatcaaacctaggattacacgaaccttaaatcccaggaggtgtgggcagccattagtcagagtattcaactttattcacaaattttcttgatgcttaagaaatctaagtgttctggctggttgcagtagctcacgcttgtaatcccagcactttgggaggccaaggcgggtggattgcctgaggtcaggagttcgagaccagcctggccaacatggtaaaaccctgtctctattaaaaatacaaaaaaattaaccaggtatggtggcacacacctgtaatcccagctactcgggaggctgaggcagaggaatggcttgaacccgggaggtggaggttgcagtgagccaagattgcaccactgcactccagcctgggtgacagagcaagactccatctcaaaaaaaaaaaaaaagaaagaaagacagacagaaagaaaggaaacctaagtgttctgagtttacgatttgtagaccttacctcatatatcaaattattctacctggtgatgaattggaatttcactggagtttcacccagtatgattgatgagatatgaatttatggcaagctgacaacataaattaataaataatccacataacagtttattgtttcaactaatgaaaaatctggatactcaatgtaaaacgtatctagattataaaattgatatcaaatggatatacaagatttgtggaatccagtagccatggagagatggtagaagaaaaagaccattgctactacttctccgtggaaaaaaaagcttctgccaggagtatctcattaaggtccttaaaatgccagtcttctcctccctccaacctctacataattttgtcatactgttcttctagtttgaaatgccatcttatctcctctcctctcacccaaatccagcaaatccctccttaatatcaagttcacgtttctcctcttctgtgaagccttctaagccaatactacaacctttcctttcttagcatttataatatggaccatgtattttagtactggactgtaagttctttaagggaagaggtctttgcatataaatctttaatttctacacagcaagataacttatattcattcattcaacagattgagcatttatatcctgagttagacccagtctgacaaaggcactgacatggaggagctcatggtctgatggggataacaggtatggagatgcataaatacattatggcaagtatataaaagagctaaggctgtcctgtggctgcctgaattttacttgtgttccatgcatggttctgttggatcaaggtgggaacagcatacaaagtatgggacacacagggaagcctgacacacataaccaaggggtcctgaagccaaaaagcgagagctgatcagtgtcaagaggataaaagccatcatcaaaagttacagaaagtcaaggaaatacaccaagaaaggcaggtcaaggtggaagcaggtctgggagcttacctatacctgttccagttactgtggctgcataacaaattactttcaaaatttagtgacttcaaacaataaatttaattttgcttatgagtctgaaattcagacatggcttagtggggatagcttgtctctgctctgctcaacgtcatatgagagggtttgaaggctgggaactggaattatctgaaggtccatttacaagcctagtggctgatgctgcagagactgaaacagctgggggctggaacagcttggactcctggaactgtctctttgtcgcaatgtggcctttccagtgtggtctctccagcatggcaccatcagggtagccaggtgttttggttccctaccgctgcacagcaaatcaccataaactgtggcttaaaccatgcacactcatgtcacaggtcccatgggtcaagcataagccatatctttttttttttttttgagacagagtctcgctctgtcgcccaggctggagtgcagtagcacgatctcggctcactgcaagctccacctcctgggttcaggccattctcctgactcagcctcccaagtagctgggactacaggcacccgccaccatgcccagctaatttttgtgtattttttagtagagacagggtttcaccgtgttagccaggatggtctcaatctcctgacctcgtgatccgcccgcctcggcctcccaaagtgctgggattacaggcatgagccactgtgcccggccagcttaagccatatcttttaactggatcttctgcttagggtctcacaaggctgccattaaggtattggctgggctgcattctcatttggagactcaaatgggggaaacctgctcctaagctttttcaggtgtttggcagaattcatttccttgtgttgtaagagtgaaagacccagctttggctggttgtcagcatgctcagcttctgcccagattcaagggaatgggctatagatctcacctttcatggaaggcgtatccatcatgttacaggaaaagcatatgggagtgggaatctactggtttagttacctctggaaaagacaatcagtcaccgtttgccgtttggccacaacaattcacatcactcccacatgcaaaatacatttatttcctctccctccatctttgatttgtctaccaagatatggttcaagggagtgctgctataagttaagagtcaagtggaaaacttttactactacaatctgggagaaaatatttcaaaaagaggatttttcacctgagttgaattcagttagtgctatataggaaggagtttgttaaatgagtgatattcactttaataccattgtttgtaaggtctggtattgctctctgctttatttgtgtctgttttatctccctgacaagactatacactttttgaaaatagagacactgtattttgtgtcttctgtactccttgagtagtgctagtcccaagggagagactcagctcattcctacaaaatacatgaattcctcaattccctgaggccccagtgtataaattactgccaatccttggaaaagtctaacttgaaaaggcctctatttaccaagtccatgaatcacaacagccctgtacatcaagaaatgcagtgtgatttttgaggtgtctgtatgtccagtgaaatttcttccttttggaatgtctccacaaggagtagaaggaaaaaagacaaacataacaaggaatttgactgtgctcacacaacatttggatagctgaggggaaggtttagtcttgcaaaatgtcttcaagggcctccttcctcccatcccaccccatccccagtggagataatttgtagtttgaggcgttgagctggtgaggtgacttaaagaacaattccatttcttcattgtatagaaacatcttaaaagagatgttcagagtcttagatattgttaaagaagatttcaaataaaagctaaccaaccctgagcagagctttgatgaaaaaattttcccagctgccttagtggcttatgcctgtaatcccagcactttaggaggctgagacaggaggattgcttgaacccaggagtttgatataagcctgggcaacatggcaaaaccccatttttgtaccaaaaatacaaaaattaacaaggtgtggtagtgtgcatctatagtcccagctactcaggaggctgaggtgggaggatcacttgagcccaggaggtcaaggctgcagtgagccaaggtagcaccgctgcactccatccagcctgggtgacggagcaagatcttgtctcaaaaaaaagtttttttcctcaatgcatcctaccttctcacttgtgttatttttttaaaactcacctctccccagagtcacctcttcccagactattacaaaatacccttctggctggacacagtggctcacacctgtaatcccagaatttcggaatttcgaggtgggaggattgcttgaggccaggagcctggccaacatagtgagatcctgtctctacaaagaaaaaaaaatgaagttagccaggcttggtggtgcacacctgtggtcctagctactcctgaggctgagacaagaggattgcttcatcccaggagttaaaggctgcagtgagctatgattgcaccactgcacgccagctggggcaacagagtaagattccatctctaaaacaaaaaccaaaacaatcaaaacactctcctgtatttaaccataagttctcttctttctttctcttaaatacgtacaatctacttgaattttattcaggtgaaagtgggaatgactgcaaattgcccaaagctagattctcaaactcaaaagtgtctaagaatcatctaggcagcttggtaaaaatcacaggtccctggccctaccccaaacccctgaaggagaatgtgtgcatgaaggagctgaggaatatgtgtttgttgttgttgttgttgtttttgagatggagtctcgctctgtcgcccaggctggagtgcagtggcacgatatcggctcactgcaacctccgcctccttggttcaagtgattctcctgcctcagccccccaagtagcttggattacaggtgcgtgccaccacattcagataatttttgtatttttagtagaaacagggtttcaccatgttggccaggctggtttcaaactcctgacctcaaatgatctgcctgccttggcctcccaaagtgcagggattacaggcgtgagccacagcacccaacgaggaaaatgtgtttttaatgaacactgatctagaggtggtcttgttctctgtgttttctcagggtcaccactaagtctgaggggagcagcttccaatgctcgcatagctaattttcttttccctcctccacaccccaagtttgcctatgagaagaacagaaaacaaagggtagaactaattgacaaagatccttcctgctctaacatctatgattcttttaattatatctgcccacaattcccagatgttcatagtctccccaaaagaagggatttttctcttgaaaccaagctagacagctacaaatatgttctaaatttcacaggccctgttccctatggaaacacttatgattaaacccaattcccaattcaaattaaaatttagcattagagattgaaatgaaaactaaagaggatgatctcaaagttgctaatttttcttccctcccagggtccttaacaccattgcagttttgctaataacataaggatgtagtagcatcctttgctaataacatcatcttgcatcctggataatcttggccctataagcatccgggggataaaaacacttttcactgcccctgtggtcaatagcttctgtgctgtccactatagacccatgattatagctcctggacaatctcattgacagcactgacctcaatggatctgactgtttcctattagtcctgtggtacaacagctcattcattcattcattgtgccaactattcaaaggatgatgagggaaggctggaatagcagatatgtctctgttcttcaggagttcacgagttctctatccataaggatagggggcatggttggggacccactcctttcatcatgggtaaagattggggacaaacgagaaaagaaaaccaggttcaagaaattcattaactgtttccatttattatatggatcattactactaaaatagacttagagcatcaatcctatcattttgcagatgatgaaactgagactcagagagatggagtaatttgcccaatattacacagcacgtatctgcagcctcctaattcaggactccttctgctatagcaacaggctaagagaagccaataattggcttatatttgccagctgttttcatcaaaatcttcctggttacccaaagggaaaaatggctttctacattttgtggtaggtcattctagaaaagaaagatgctaatcatcaccaaccataaaacaagaaagtaataagccttccagattatctcttccaaccattctcctatagatctggaccatgaggcctagagggctggagcttcagctctcaaggctatgtgggagaggcagagagattggaatccagaatcccaatccctggcaaatgaccactaccacactgctgcatctctgaaaaatatatcttggtgttgacccaaaatatatttaaaagctttgtcacatttttttaaatgtctatatgtgtacgccaatgattgcacaatcaatgctgtgctttgatctgtcacactttggtccttagtgctggtacatatctcaatggtgacaggagtgacattcaaggaaaaatgactcaaagatgctttaaagtttcctaagaagatgctctatatatgaatccctttagcattatttcagaactcaagaacctttagcagatttcatatttaatataatgtcaccactagttcaaaatctatatataataagatagaaaagggcaccactggtgctgaaaatgtcacgttgaagagaacaacgaagaacacacaatcatctacagccttctcactcagcgctgtcaggaaccaacagcactggcaccaccaggagcttgttggaaatgcaaaatcttgggttcaccccagacctgctgaatcaaatctttattttcacaagatccctggggacttgcatgcaggtaagatttgagaagcacaggtctaaggtatttctctatcaatgaacagagcaatgggtagagcagaggagaggcccagaaactcagagttctggtgttccttgcatggccgttgaaaactgtccctaacctctctgggtagcagcttcctcaagtataaactgaggctctggttgaaaaggctgttgtcataagctgctgacacagagcttttttcagtcccaattgtgtaggacagcttgtgtgatgagaattgaatgacatgcatatcacacatttggtatgctcaatgaatgctattaataaaattgtgaatcacaaatgttactcccatttccttcccagctcagggaagaaacggtatgcatgacatgatgcattgaatggggcagcctacatctactttgcctcctgagaatatcctgagcatcaggccagtgttggcttcgccaggaatcctaactcaggtcttgaaagcaagattgttgctgttaaaaaggtgacatgggatttttctgtttcctcattacattgctttagtttctccctgcctgaagcttctttaatctgtaggctgtgggcaccacctttaaagttttgactcacattatctatcccaaagtaaataatgactaaagtggtggcaaagtcaacacattctttgaaagacaatgaatctgggtgttgaatgaaatcagatgccaggaatatatacattgttgttacaacgctattacacaacaggccttagaagaattccttttctccaggtaaaaactacccccgtaccagttactctgggtgaagaaaggcgtctatgtttggcaaggactaaggaatatttgacttcatgaatcaataactattctcaaagctgctattgacctctgatctgcaaatctgtcagcaaagagagattatggtaactatactgctagtaaaatgcaaacctgttggttaaacatttgctgaaagccctgctagtgacccctgttaaagtgaaccaaatttggccacgtgttcttgcaatgttctggaacatcagagaaaaataactgcctgacccaacacagcttagctcctagagagctaagagatttctctgggccagaagcgttggcagggatcattcctttctcagtctctctcttctaccactgggcccgagttagtgggatctgttaggaggtttttgaataataatgactgttctcaatccttctgaagattctcaaaattaatttcttctcaagagtgcttctaccccacacaaagaaaaggtgcaagaatgttttttcttattccttcatctccctcaatgcctatcatagtgtttggcacacaataggtcttaaatactttaaaaatgaacaaagtgttctttccactgtgctccacctatacattgtacaaccatctacttgaacacttaccatgctgaatttcgtggtttatttatatggctatttcacttttttatttttattttttgaaatagattcttgctctgtcacccacactggagtgcagtggcacgattatagatcactgtaattgcaaactcctgggcttaagtgatcctcccacctcagcctcccaaagtgttgggattacaggtatgagccaccatgtccagccagctattaacctttctgtgttatgtctttcaaaagaaagattctttgtcctattcatcattgtttctccatcacttgttacagaacccaagggttatgggcttggttcatcctttctgaggaagtggggtagcagatgatagcaagataaccctcgtttgtaaataccttagtgatggacttaacaatctcttctttaaaaatataagtgcaataagaccttgactaaaagagtaaggttcagaatttcctcataaaaggttcagctacacgttaaaaggagaattggattccaaagtttaaagtgattctatgaaagcctttattaatattttctgtgttcactgaaggaaaatgagcagctgagagcatactaaataagaagataccaatgatgcattacacatctttaattagtactaatgcgtgctatgtaattaatccaatttagcatcccttctccactagaaacatctctcttccctgcagtctccacagaatggtataaatgtgtcctgatttactgcaaataaggtgctttcacttcctcacagtggttccctgtcatgcaaatgctctccactttctgttcttgtgagctggggctggtcccctgggtaacctacagaagacccagacgatttggggtaactttggtttcctctagttggcctagctcagaagacatttctcaagttccttttccaagattacgcagattcgactccatccctgctaacttaaaagtccaactacagaggccacccgttccccactcgtatctcagctcctacctcgtaacagacaccagagtacgctccaacttctggcctcattttccttcaatataattagccgcacataaatgcccttctttattttctaccactagttcccattctgagagttgtaaatcatctcagctcgaattgcccctctttcgtaatatttcaagttgggctattaaccaaccaccatcccttattctctaaaacccaggcaatataacatgacagttgatgatatagcgaattgctcgtttgaccagggacttgagataatacagtatacaaagttgagcagtgactatctttttgatatagtagcttaaaaaatcacttccatgcttcagaatgcaaagcaatgtgcatattgcattacatactctgctaagtcaaaaaagaagatgagattcccttttccaccccaaaatgtattcaggaaggataagaaaagaacaaaaatgactatagaagaagacaatagcagagtctagatcaaggactaaaactggctataatcaatctcacaagaaacaaaaacgaatgtatgttcattgtttcttaggagcatgaccttttggagaaaagtctggaaatctgacctttggcagaaaagatgaaaaactgatctaacaccatttttctttgagaaaagctcttctctacactatatctgaagagcaaaacttgaactcatctatgtcagggccagggctgtgactagccatataatatttctgtgggaattttttttttttaattgctttctttcctccagccagatgcaacccctcaccaggcacgtggcctgctaaattgaatacaagccacattttagcccctttatcccctcagccaaaaacctttgagcagtgactaaactgcaccatctttcataacaaccctcattaacaccctactcaaattctttcaatggtttgttactgctctcaaggtaaaattcaggtttcatattgcagccccaatctcactctcctctcttctggaactgtgatagacaaatgtgagactttttaattctgtcttttgtatcttgttatgccccttttatatttttcatctcatgtgctgcattctgcataatttctccagccctgtcttccagttcattaattctctcattaaccatgcctaatgcttaatatacccactaagttttaaatttcaatcacttaattttttgtctctgtaaattcaaattttaaaatctgctgtatcatttttattattttctataccctgaaaatattttccagcttgtctatttgtttgtttatctgtttctgaagtagtaggcttagtattgtaagaaatcctttttttcttttttcctttgagacaggatcttgctctgtcgctcaggctggagtgcagtggcatgaacacaactcactgcagcctcaacctccctggactcaagtgatcctcccacctcagcctcctgagtagctgggactacaggggagcagctaattttttagtgttttatagagagagggtttcaccaatgttgcccaggctggtatcaaacttctgggctcaagcaatccactcgccttggacttccaaagtgctggaattacaggtatgagtcaccatggctggccttaggtaatttcaatatctaaaattttgtgggtctgttctgctgtgggttgtttgtttttctttttagtgtttattcattcattaatttattactgtgagctatgcattttccttagaaaattatttgagggaattgcttgaggcctcagatgaaggtggggttctctgatatttacatttgcttctgtcaggttcctgaaactattaccagtctggaacaattctaaaatgagtttatagcttgaggttttctggactgcctgggtgatgtgaatttgggctgcaaacccatgagaagacttgttttccattatagtgtccttgggccagaggattgattcctcctgatgtgctcaggtccaagaagactttcctggaaggcaaggctatttctggttcatcattaaacatgaaaggtatagtcctttagggcctcaaggttgtgtgtggaagatcttacattagattatttgcttgagcaagccctgggctttgttttttgtgctccttcatccaagggaccttgacaactgaagtccaatttcagaaagcactctccatgttctatatattttggagggtttctccctttatgtagatttttttttattttcataattgagattttattggttgaggatcagtacagacatttcaatttgtacacaattcttaacatatgtaatgaaattctaaaaagccatgtattgtaattaattcttttttaaagttattccagtgactttccagcttaaaatttggaagcaaattttccttaagaggctatcaagtactggtatcttcacacgttggtcagctgttacatacagcccacctgaatagcacatacggccacaactgaatagcacgtacactgcatattcatatttgtaatctttcacagcacagtaacaatgttattaggaaaacaggactaccaaaaccaaagatgttacagagtgcacacaattctgacagggagagccatgatcagagtggttttctttaggaaacaattctactaaaaaacaacatgggaatagaagtaatttaaaatgttcaagacattaaacacaggactgactccatattgccatttaatatgctttgtattataggatataaaaactaaccccccatctatggaatattaagctgacacccgagatagtcagagcctcccgtaattcaatatcccacactattttctggttgtaccaaaaaagaaacagccagcaaatgatttcacctcttaaaaaaaagcatttacatttaaaaaaaagggatgaggtgggattccttccttcttaaaaatgtttcagccgggcgcggtggctcacgcctgtaatcccagcactctgggaggccgaggcaggcggatcacctgaggtccggagttcgagaccagcctgaccaacatggagaaatcccgtctctactaaaaatacaaaattagctgggcatggtggtgcatgcctgtaatcccagctactctggaggctgaggccggagaatggcttgaacccgggaggcggaggttgctgtgagccgagatcacgccattgcactccagcctgggcaacaagagcgaaactccgtctcaaaaaaaaaaaaaaaaaatgtttctagagctactaaaaaatttgcatttacagaatagctgataaaaatattcctctggattgtacaagaagggagacagggaccactgataagacatggtatatggtattaatcagacttggcttctttctctcctgcttcatcagaggctggactctcctcagttttcgtttccccattttctgcaggtaaatcttctttagtttcttggttagccacttcagtctgttttccctttgctccccttttcccttttgtttgcacttttttgtctgaagatttatccttcgctgctgcctttttcggctttgcttccacttttgcaggaggtttagctgacaaccgtgctgatctcctcttgggctcttccttggcgccccccaccccacctttatgtagatttttaaactaactcaataatgctagctgggcctggcacagtggctcatggctgtaatcccagcagtttgggaggccgaggtgggcggatcacctgaagtcgggagtttgagaccaacctggccaacatggtgaaaccccatctctactaaaaatacaaaaattagccaggtgtggtggtggatgcctgtaatcccagctactcgggaggctgaggcaggagaaacgcttgaacccaggaggcagtgattgcagtgagccaagatcatgccgctatactccagcctgggcgacagagtgattctccttctcaaaaagaaagaaagaaaaagaaaagaaaataataaaataagtgctagctgcaattatttctactatctttttttggttactcatgaaaacagtctacttttaaaaagcatgggctaaaaaaagagggggctagaaactatctggaacagtaaagtatgtcgatgttttagcttttcttttttctgaaaatatgtgtgatgtgtttagatgagaaccagaaaaaggcttttcactgtgtctgtactgttattcttttcattccatggggtgttactttagcacttaactagagaagatgtacacacagttatagaaagagctcggggctcctcatagcccatcagattccaccatttgatttacactgagtgaaatggattataaacatttataaaagtcaccagagcaaaggaataaagtgtcctgaggagcaccaggaaaagaatcaacattttagactagaaatatgctcaccaagtatctggggagtaaaatgcaaaccacagtatgtgcagtttggaaatattgtatttgttttacatatcagcctttacacaggtcttccaaacttgcagacctgggctttagttgatttccactcatgcaggccttactcatcatcatttcaaatgttgccatcactatatattaccatcttccactgtggcttatatatcatgctgcctggatcagggatgttgtagaagtgagtttgctcctccagtggatttcaggccaacttttcctatgtcatgtctaaagccaaaaaaaaagaaagaatgttataaaatgggtaacacttccctatactgatgctgcagtatggtggttatatacgtgaaagaaaaaaaactgcaacaaaacaaaacaaaacaaatgaaaacctgttttgttcctagtgggataatgcccctgtgctttgtcagccagccatggcataactgccaatgtgctgtcagtcacatctgcagggagaaagagcatgcctgtgtttatttgcatgacttggttattttttaagtctccccaggttattgtaacatgttggaaaggctgagaattgctaactctcattattgtggagtaaattttaatagcccttaggcttgacaaatcatgtttctagctgataataggagagatattattatccccaacttacagatgtcgaaggcaaggctcaaattatttaaaggcctattagggcttaagattaatcactgcttaagtaccaaatgaaataaatgcctttgaggagagcacacttccttaacttttccttcatcttaaataaaggaccctggaatcagatatgcctagaatagggaaggacttcagctgtaatgaggaaactgggaatcagagagccagagcttatcttgcccatctttatgttccctgcactgtctcatcccatgagctcaataaatatttgataaactaaatgaaatgaggtgaccaaggtcacacagcccccacacctagcttccagcctccaatggcgctatacctgctccatacctgctccccctacagaggttatctgtccctgtgtagctgtggagaccacacctcctaccttgtgtgggtgagtcaaggtttcaaatggtctgtctctttcttcccaaagtacacttgttttgcttttccagcatgtgcaatgatttttttattctaaaactatggtagctgtccacgacagaaatacccgtcactaagtcagggtctagagtccccaaacatcgccctctccttccattataacactttttaaatgtataagaaaagcaagctggctcatgcctgtaatcccagaactttgggaggctaaggtgagaggatcgcttgagcccaggagttcgaggccagcctgggcaacatagcaagacctcatctctacaaaaatatcaaaaaattagctgggcatgatggtgcatgcctgtagtcccagctactcaggaggctgggtgggagaatagcttgagcccaggagattgaggctgcagggagccaggattgcaccgctgctctccagcctgggcaacagagtgagaccctggctctaaaataaacaaataaatgaaaattaaaaaaaaaaaaagaaaagcaagttcataaatgctcttggttttgtgcaggaattgtttactcattcacacaggggcctgtctctgtaccagttacaaagagccatgaccgggaatatctctgaggttttctcttgcaccgtcaactttctggtttcttatgagttgtgcttctcctcaggtttcacatgttattctgtttctccagccctgtctgtggacaatgttatctctcattcacacttttgggcccttaggcactgtgcaacctcaaccactgcctcctcccataactgccactgcattcatccccaacccggtccacctagttcacctccgaaggtggtgggagtgaagctggcctggggttttcactgtggtagactgtgggggtctctgcaatttgggccacagggagagtgaggggtggggcagacggagaccaaagatgaggagagagatggaaattgtttcctgagctgtgaggagctgcctggactttgggaatgtaaggagagctagaatattctgttgctgttgtccttgagtgcagcgccctgggtcggggagccatggggagggaggtaataggtctggatgacatgccaccatcaactagagaagagccagcctatcaaggaacccaaaagaaagtggattagcaggctgtgctgacagaccagtcttgaagagagggaggtctctcaacactgagatggcattcacggacggtgcgtgtcccgtcactcaccctccaacgcaaactcccagaagacgaccactgccttggtgctgggcacatgagctcagaatgtatgggggtgtatgtggcatggagtgcagacactctgttgtatagactcggagacaaaaataatcacggtgtggactgcattaggagtagggagtcaggcttgcttgggttctaatcctggccatgtgacctcgagctagctcctaaatttctccaggcctcagcgtccttctctgtaaaatactgcctactgtaggccgggcgcggtggctcatgcctgtaattccagcactttgggagaccgaggcaggcggatcatgaggtcaggagtttgagaccagcctggccaacatagtggaaccccgtctctactaaaaatacaaaaaattagctaggcatggtggcgggcacctgtaatcccagctacttgggaggctgaggcaggagaatcacttgaagccgggaggcggaggttgcagtgagccgagatcgtgcctctgcactccagccccggggacagtgtgagacttcatctcaaaaaacaaaaacaaaaacaaaaacaaaaactgcctactgtagagggtgattgctgctgctatgattttatacaaaaatatattaaattccccaggtatagatttttgtatttggtactaagataaacaaaagagatttaccaaaaaaatcacattctgtgcatgtaacaaatactcacatgtaccccataaataagtaaaatattatatatcaattaaaaaaagacaaagtacgtgttcttccactgtgcattttgttatctggaaatccataatagaatatgaagatatttactattaactataacccttaaggatactttctgccaggtgtgttggctcatgcctgtaatcccagcactttgggaggccaaggtaagaggatcacttgagatcaggagttcaagagcagcctggtcaacatagtgagaccccatctccacaaaaaatttaaaaaattagccaggcacaatggtacatgcctgtagtctcagctactcaggaggctaaggtgggaggaccgcttgagtccaggaggtcaaggctgcagtgaggcataattgcacgactgcatgccagcctgggtgacagagcaaagccctatctcaaaaacaaaacaaaacaaaacaaaaaaaattttctgaattgtcaatataaagaatactgtattcagtataatttactaattgttatatttctactgaattctcatttttagaaaattaataattttaatatgttatctaatgtctttctgcttatctaagtgtttaattaaccagaaagtcaaattttggagctgtgctgaagcattcatagttgcacatgtgatattatgtcctaaataagtaaaaaattgagtgggagcaagaaatggtatcagaccagggattctggtcatctccctggaagacttactgtgtgctgtggctttgtgactgacgggttgtgtgtatgtatgtgtgtgttgcttaagctacaattcaggagatactaataaaatccattcaaaatgaacttacagctactaaattttagaagtaagagctaaaacccataaatctcaggcacaatggagactaataaaattttgtaatatattttattttactacttcaaaacaccctttactaacatgagctaattaatcctaaaatgactcctacatgaagtttactattatgatctctatttcctgctgggagaatggaagatagagtgattaaatgatatatttaattaggattcaggaattttttatattagtccacaattttaactaataatcagaaaattatttcggtttaaaaaaagttgttgaataacctttttgaccattatttatctcagaatggcctgatcataaaaagaattctagcgttttcttgtcttaataaaaaactgttgtcatggaaatatttcagatccctccatcctccaattggctgaatctgaacagtacataaacaagcagattaactgaggctcagtgaagtcttttacggtggaagtaacgtctggaaccagctgtattacaagcctttccaaagtccatctcccaggacagggaagagagaataaaagaactctgttggaggctcagctgtactctctaacaatggcttcttatcccaactgactaagttctctcactctatctaaatcaaatacactaaatcaattactgcttcttgtgcagaagtcttatctattttgattggcaaataaaaatgaagttgtttactaggaaagctgtggtatgacaatattttccaggcagtttgggcctggggtttgcatttaatttaatcaagtgaatttgtgaactgatagtgccattcatttcagtcaggttgggggacctgaccaatgcatgattttatattcacaacaaaaatattctccttccttccctcaatacaggaactctgcatcaaatcgctttccgtgaatttgtttccatgcagtggtgtggaagagcaattataaaattaattcagagcaggaatgttttatatcctgaatgaagaagaaaggggagattggaggtgctaccttaatgtgtgcctggatccatcattcctgaacatgctgctgttttatttcattctgatgtggtgtttctcccagctcctaagctccttttggcatatatctttttgcagaactggaaaaaatttgaaatgagaaaaaatgagttgtggctgttttttgttttgggttttgttttggtagaaatggggttttagcatatttcccaagctggtctggagctcctgagctcaagggagccgctggcctcagcctcccaaagtgctgggattacaggcatgagccgccacacccagcctaagaaatgggttttgttttgagatttccacaaccacactagaagtggctgacatcctgggagtgagtgtggaaacttcaagactggcttttgagaacctgagtctagggcgtgtatcgggtgcttcttatgttttcgtgctcacttgtgtgggaagacaagatatgagacaaaaagacacacatagctgcaggcacacacgtacatgtgtatacatattgctggtttagaaggccttgagcctttgggatactgaggccagaggatcacttgagcctgggagtttgaaaccagcttgcgcaacatagtgagatcctatctttacaaaaaatcttttaaaaattagctgggcaaagtggtgcacagctgtggtcccagctattcgtgaggctaaggtagggggatctcttgagcctgggagatggaggctgcagtgatctatggtcacgccactgcactacagcctaggcaagatcttgtttttttgtttgtttgtttttgtgtgttttttcttaaaaaaagaagaaagcagcctggagtaacataggaaaaggattatattaattcttcaagagagagacaaggacagtttgtctaaacttggagcacttataacgaatatgataaatcattcatataatttcctttataatgctggagttgaagaactagaacaaattgctcatcttatgaggccaggctggtggtgaatcaagccagtattctgccagcagcatgaagggggtatgtcatgggacgtcataattaccctcatgctaaaacctcaaaaggttaaagggccctgagtgaaatccccaacaccttgtggctcttaatgagtgtttactgtaatgataaatgataaaagctctctctaaatctgttgctcactgacttaactaaacttttcctgatttatttttatgctgaggcttttatctgggactaagtttcataagcttgcagtccatggtgtaaagtataaaatgacttattttaagcttcaaaggatgttctcaaatttgggcattccagaatttaatgaacagacagcctgtccctcatgtgtgtttatgattggataggcttgctttattttaacctgataaacccggagactcatcattttcaagggttagtctcatgtgaaaacacatctatatcaagcttttacacaatgcagttattacattttggggaatgtggttgtatgtgcgttactaagtatatcctaaagtctactgagtatttggaatttatagatacagtcagccttcagaaatatcatctaatttattcacatatccactttgtgaggcaggaaagggtaggcttatgtgagtatcctcattttccttactgaagtgggaaattcatcctggaggaaggatctacatgagagagacattcattgcctccaagtgagtatctttgagtcgtagaagagttatttgccttgaggggccttatattgactgagaaaggggggtggggggatgaggcatgctgacttgaagcaagacaaagacaaaaagctcatttactttcgtgatcttcaggcctgttttgctgccgagagagtacatcagaatactgtttggaagcccccttaataaatgcaaactggatcagaatttcagaatgacatttgcacacatcagttgccaacataatattcacttattgcatgattatttaattggtgactcctatgtacaaggcagaagctttaagccggggcagcagtgggaaacttaatgtccacagtccctgcctcctggagcttacacactggtgttccagggcaaaacaaaaactagtatatatatgcagcttaatctctacacaaagaggttcttctttaacaactgccagttcgcccctgtaatcccagcaatttgggaagccaagccaggaggatcactaaggccagcagtttgagaccagcctgggcaacatagtgagacccctgcctctacaaaatacttatattttttaaattagccaagtatgttggctcatgcctgttgtcccggctactcaggagattgaggtaggaggattgcttgaatccaggagtttgagagcagctttgtcaacatagtgagactctagctctacaaaaaatttaaaaaattagccaggcatggtggtgcacacttgtagtctcaggtgggaggatcgcttgagcccaggaggttgaggctgcagtgaactgagatcatgccactacactcaagcctgggtgacatagtgagatcctgtctcataaaaggacaggaaaaaaaaaaaaaaccctgcccctctgtggtctgatctaaggccaacccattcccttaacaatctcaattgggagatcctgggagaaaagaggaggtggggccagcagggcatgtgtttataccatgtggctaaatgctgcctctcccacgctctctcctcgaactctactcttcatttttctactggcaaacaagaccaaggacatctcaagtaactccttgagtccattagagcaggccagaagagctcagaatccaggattccacgagcacatgatcatggagggtgggtggggatgctatatctgtgtttcctcttttgagaaactaaaggaattgtgataagaggtgaagaactaggacagtgtcaatagagcaagggagaagggtacaaagagaagataaaaatcacaggaatttttgtgggggataaggaaggagaagtatctagaaggattccttgctttccatgcaactataaaataatggaactgattcataaggaaacaggttttgagtacggaaaatgcttgatttattctgactttgtttgcattcacatggaaatgtctagtgaatgtagatatatgagtctggagcttctaagaaaacttgggctggagattacaaattggagatctcatacttcttgcttctccctaccgaacttctgtgataccagccatttatggttttttttctatctcactggccactgcttttcattttctttcatgaatgcatcttctaacaccttcatttacatattcttcaggcaccaaaacccttcaaacccctctatccaaaagtaaaccaaatcatcctccacaccactcccaggctactgctactagccatctactgcttccgtgctccctgtctcaagaatgacataattatctgcttagccagcagatccagaaaactggaaagggtcctcattcttccttctctcttgtctccaactagctctttactcttgagaggctaccactcagattacctttcagatatttcctcctctttctggatcttttatagcaatcttagttcaaagtccttacctgggtcactgcatcagtctattgctttcactgtcttcagcggtgatctttctaaaatgcaaacagaatcttatcacactgacattgccttcttaggtaggtcatttccatgtggtggtaaagatgaccaccagtaacactagacttgcaaactatgtcatcatctttggaacctcagtggaaaaaccaagccatttaaagcgtattccagtaaaaagtccagcgtatgactcttactgacccacttgggtcatgtgcccattcctgaacccatcactgtggctgggggtctggagctctgattggccatccttgggtccagtacctttcttcagggaatggagccagccccatccaaatcaaatggatggagagagaggaagggttgactacctctaaataaagagcaatctggctatagaaggaataatgaatgaagggtgggcccaaatcacagatgtttcaaaaatcttttatttcacttttaagaaaaccatttcctacatgtctaccctaatagagtcacatatggctcctaaattaggcttctcactcagactctgtgtctctgattatactacttgttctgtctggagttcatttgggggataggtgggtgggagagagaggatagtttcagttgaggacatactgaatttgagatgtccaggagtggctgtgtggtcagttagatagatacatacacactgacttggaggtctgggacagagatatatatttcagagtctttggtgaagagatagtggttaaaggcagaagagagaagattctcacaggagatatataaaaggtaggaagagagaagaatctagcaatgaggtcctcagagttcattggacagaggagaagagtctatgatggaaactgaatagaagaagccaaaagggtagaagggaaagcaggcaagtgtggcatcagtgagtgtagggaatacaatagaaagtttccagagaaaagagatctctgtggtggataccattaagaaaacaaatcaaataaatagtaaaaagcatcccctggctgaagtggcatatatatcttcattgaagttaatgaaaaaaatgtcagtggagtatgagaaccagactggaagcctgaggggataaatggtagtgaagaagtgtagacagcaagtgtagacattcgatcatgaagagaagaagcaaaataaggtgattattagaagaggatgtgaagtccaaagagggctttttacaatttatttttttaggttggaagtacatatctttgtttttacttttttaaaacttaatctttgcaaattagggaggcacagccttccgtgtgaaattaaggtgagttcccaggttagaagaacatttgaatgctgatggaaaggatccagtgggcaagagagaggatgcctgggagagaatgcattctaggcttccttggaatgactgatctctaataggaaaaggacaaaaaaggaaagaggaggacacggtgtggatgaggatgctttctgggtgtgtctgtggagatctgtgtgatgatttctgttttctcctggaactaggaagcagagtgagctgttgagagtgcagagaaggggagggagctaaggacgatggaagcccaggtgaagttggtagctgggaactcaaagtgagtggaaactgctgaaatcctttactttcttcagtgagtctcagctacgcagattcaagcttgaataaagcagaaacagcagaggacagaggaaagggctgtttgggagtaatttcaaaagaaagactggaacgtgagactgtgttgtgaaagctggacaagaaaggtggtgaagttaaaaccaaaaggtctcaaaattaggagaaaatggaggggatcgtgcttttggtgaagtcaaagaccatgtaacactggttggggcatgagaagtctgtggtgagtaagctgagtttgagccgggcacagtggctcatgcctgtaatcccagcactttgggaggccgaggcaggcagatcacaaggtgagaagtttgagaccagtctggccaacatagtgaaactccgtttctactaaaaatacaaaaaattagccagatgtggtggtgtgcacctgtaatcccagctactcaggaggctgagacagaagaatcgcatgaatgggggaggcggaggttgcagtgagccaagatcgtgccattgcactccagcctgggcaacagtgtgagactccatctctaaataaataaataaataaataaataaataaataaataaatccctgagtttgaaggtagagcagtttggagtgttgataaggtccagggcatagagagagaaggtcactagatatgaggaggtcaaggacctgagaagccaggagggtgggtgggaatctgggcacctgttcgttataccataggtggattctatgccagaagttgaggtcgatagaacctcatggtgaaccaagtaccagtcttcactcagtatatctgtgttgagggagggggatctgtggatgccagtggcaagaaagaaaaagcgtacatgacatgagtctccaagaagtactttacagtgtcaaacaaactttaatgataaaattaaagaaagtaaatgaattttcaatgtgctgcagttttaatatagggtaattaatgctataaaataacagacaatttctgattaaaaacatttttttagaaagaagtgttctagcctggagtgcagtggctattcacaggctaaatcatagcactctacagcctggaactcctgggctcaagcgacccttctacttcagcctcccaactagctgggactacaggtgcacaccaccacacttggacaagatatctgagtttttaaaaagtatgtgagtatgcatgattatgagaaagttctgctatcaaaaagcataggagttttgccagccacagttgttcacacctgcaatcccaccactttttgaggctgaggcaggtggatcacttgagctcaggagttcgagaccagcctgggcaacattgtgagaccccatctctactaaaacacaaaaaaattagccagacatggtggcatgcacctgtagtcccagctactcaggaggctgaggcaggagaatctcttgaactcaggaggaggaggttccagtgagccaagatggcgccactgtactccagcctgggtgacagagggtgactccgtctcaaaaaacaagcaaacaaaaaataggagttttgtttgttgcatactaattggagttgaggcttcgattagcagatcttggggaccatacagaataagaggccattagctagcagggcttcctggaatgatctatgaaaaggtaacaaggccatttccccaggctcagtttcaaccgtgggagacagaagatgtctctagccatgatccaaagatgtctggttttaggataaagggaaagagaggaggaggtattatatttgtaacaatttataacagtagttggtcttagaagtcttcatgctgaaacaggcagggagaatgtattattatagaagccttcatattggctgggcatgatggctcatacctgtaatcccagtgcttcgggaggccaaggccagaggatcatttgaggccaggagttcaagaccagcttgagcaacatagtgagaccctgtctctctctcttttttttttttaaaaaaagaagaagttttcatactgaaacaggtgggaccctccagaaaaatcagactttcttagccatcacagcctttcggtgcccagaaatttgctttcatttggatgcttttgcccatcttcgaaaattctaagattgagcaggtggcctgggtggacaaggccaatggaagcatctctgcctctcccaaaatgcttctaaggccatttctctccttccaataagcaatactcgctgcttcctggcagatcttcattacagctggccccagggaattccagaggcaaccatgctcggggaagcaaaggctgagctctctgggcatgaaacaacactgaaagctttttgtcctagtacaggcgtgagtcctgatgtttttattgcaccttcacagttcagaattcactttctaaaactcctgctttgtttcctgaggatggacttcagattcccttaaaaatctagtaggtacactggaaaacccaaaagaaattataatgcagcccctaaattaattcaatatattgctatgagtcattggatatgaaggattaagaaacgttgacagcttttccatctgataccctgagataaggaggctcatggtgcctaatatcttacatattttatgtagaaatgtgatgtctggacaaatgcaataatctcttcctattgtctcattctcagaggtctcatcctggactgggcatctgttgcccttgtgtgttcagtgccctcattttatctggagaccttttctttcctcatgctatatggtccctgtggggctgtcagctactcttccctgttctcttctcccccatgcacaggggtgggacagtgacccagtctacaccttccttgtttggtagaatagtttgggaggaagcagttcttcccagcacccccagctttattaaggtgtaattgacaaaaactaggttttgtttatgtttttttttcagggagggggtgtagcttgggatgcaagcagtctccttatttactacatggaaagaaccagactgcagaatgaagccaagcagaaacacacagagctgagagatagagccctgatgatatcagctgtacttctagactcagccatgcttttccacttgtatacaaatggtagcccaggataaacatggttctgcactttgctttttaaaaattattatttaacttgatataccctcaagattactccacatcagtgtagagggagcgtcctcatggagttacacagcgcttcactggctggctataccaataattgattcaactacttctttattggtgggcatttaggattgtttccagtcttttgatatttcaaatgcacatgtcacttcatattttgccagtgcagatagtcttagacgtgggattgctggattaatgaggaaataccagtgtaatttgctagacacagacaaatgtctcctcacaggggttgctttgcattctcaccagtgatatgtcttgtttcccccgtgaatttgccaactaagtatgttgtcaaacctttggctttttttaatctcctgtattttaatcctgttctcttaagttttgcccttcttgaaaaggcagagaagtggctcagctccagccatagtaccaccgtgataagatgggagcactccccaggaatatgttcaagagacatcggtgaacagaatctagagtctatggaggaataatctctgttgggatcaaattttgacatagtcggtgatactgaaagaatagttcatagaactagaagattattattccaaaaggggtaggagtggagggcggacagtgagcatgatgggggttgcattgggggatgagcgctggaaaaattgtaaggaaaaacataggatgtttgtttgccactattagctgaaggagttggttttgttatctcaactgcaaactcataaattgtgaaggcgctactgatcattaaagagaatttccactatgtgaatcccctttctcttttccaatatgcacccccacccacccctgacacacacagcagaaagcaaattcaacattgttggagacatctttggaattgctagttgagtcatttaataactttttctgggtcttcctgcttttaaacaaaccataaatgtagagaaaatcatctagaagcatgctttgaaatttcattagtggagtactaaaagagttctaaaatgagaagacacattggtcactttttaaattacgtagagatttttcagactactaaagacattgttattttaaaaataaataatcactaaacttgtcaacattgtttattaaagccgatgttttagaatgcctaccctagagttgaaggacatcatttattttgctttttggaaaataaaaatgcaaagaaagtagaaaaaaacccaaatcatttcccttatcttgcaaaaattgaactcaaataattgagcatttctgtggcatctagaaaagtatagactaaaatttgccatcacacttcttgtaattggttgaataatggcctccaaagatatccaggtcttcatccttggaacctgtgaatgttattatgtggcaaaagagagtttgtatatgtaattaaagatcttgaggtgagagggtatcctagattatgtgggtggattccaaatataatcacgtgtccttattagagggaggcagaaagagatttgactgtagacagaagaaagaaggtggtatcatgacctcagcagagagagggctctgaagatggtaccagctttaaggtgcagggaggggctgttagccagggaatacaaggaatccagctctagaaggcaaggacactgattctccccctcagagagggccttgtaccttggcctggtgacattaattttgaccttctgggctccggatgtgcaaaagaaaaaaattctgctcttttatgccaccaaatgtgtggtaatatgttacaggggccagccatatcaaccaattaatgcttttcccaatttctaggaaacaggaacttgatgtttgattttaaagttcagtacatgtgttaatggggatgaagtagaatgtaaaggtatgataaaaataataataagaagaacaaaaaaaaacaaattttaggccaggcactgtggctaatacctgtaatcccagcactttgggaggccgaggcgggtggatcacttgatgtcaggagttggaggccagcctggccaacatggtcaaaacccatctctactaaaaatacaacaattagccaggcatggtggtgcatgcctgtagtctcagctacttgggaggctgaggcgggagaatcgcttgaatccaggaggcagaggttgcagtgagccaagatcatgccactgcactccagccggggtgacagagtgagactctgtctaaaaaaaaaacaatcaaccaacaaacaaaaaacaaatttggctgtgcttcttttaggaaaaaagacttaattgcattaaatctcaaatgcatcattagtaaagagcggcaactgagtttcctcggctggcattgtggtggtctagctatactgaagggtctccctgttataagtcaacctaattttttaaatgtgttgctaggcttgcagttcataagggaattcatcctttaaggtcccatatattagtcagctttggctgtgataatgatgtacagcaaaaatctcaaaatctcaatgtctacaacagtaagcatttatttctaatttgcattgcatgttggcagctgttaagctggataaccctgctccaggctccaggtcaggttcaggtctgtttcatggttcttctcattgatacttaaggagcaaagctcatctaggatgtgatgttctcatggtggagggcaggagcacaaaagaggtcccagaatcttgcaaacctcttatgatgtctgttttgaagtggccacactgccatttctgctaagatttcattggccaaagtaggtgcaataacactgggacagggacatttactgggggtgaggaagtaaatatttgccaaatactaatatggtctatcatactcctctattagctaaaaccaaacaatgatgcagtaagcagcaagtaaatgctattaatatatcaatattgcagttgaagggagactaaccctttggctggtggctgaacctgagacttctgcactaaattgagactctcaaatggggctaaagtggccctagagtggtagggtcccctgcttcttagtagaaagaaacacaaatccattttggattcccatagactaagactaaccaaataaaatcgcaaccaaatgaatttccaatcaacacacatggaatgaagttactatgagtaagagtcagcggaaacaatggaagacacaccccaagctttagatatgagaattaacaaaatagaaaataattagttatgaaatgtttaatgaaataaaatttggagacataaaataagaaactcaagaattgagaggctgatttgaaaaagaattaaataaaacttttatttatttataattcattaattaaattttttgagacactcaggctagagggtagtggtgtgatcacagctcagacaacctcaaactcccgggctcaaatgatcctcctgcctcagccttctgagtagctgggactataggcatgcaccaccacacctggctaaaaacctttagatacaattactgagtctaattgttgtattaaaaaaactcaactgatgggccaaacagaagattagactaaactaaatattgatttagcaaagtagactagaggtttgaagaaatcacccagagtgtagcagacagggaaacagaatacgaaaaaggttaagagatacagagaatagaatgagaatgtctaacatataattaattggagccctagaagaacagaatatagacaatggagaaaacagaatatatgaatagattagtagctgagcattttccagaaataagatttaaatgggagatagaaaaaacgcaaagtacattaggcaggatggagaaaaggaaagccacatgtagacaaattacagaaagtttagaacactgaaaacaaaaagcagctaaagataaggcaaatgacttaaaagggacaataattagactaagagcttactgttcatcatcatcaatggaagccagaaatcagagagataacatcttcagagtgctgagaatgaaacaacattatacctgggataagactacccttttatttttttctgaagggttgttctgtccccaagaaccctcccaaaataaactgattataaacctgagacttcagagtaatagggattgggtaaaaccaatcaaggacactaatcacattaagaacatctatttacatccagccatgttccacaacagctttgagtctatttctagtatataatttcaccctctctcatggatgtggatagacatttttggataaacaaaaactgcaagtttattacccatggacctttactaaaggaatttaaaaggatgttcctaggaagaaggaaaatgatcccaaaggaacatctaagaagcaacaaggaatccttagaaaagaaactgcaaaacatattggtaatgctagaagaacttgtataatataataataatatctaatttggtggtttcaaaaaaaagacaggagccaggcatggtggctcacacctgtaatcccaaaattttgggaggctgaggcaggaggatcgcttgaagccaggagtttgagaccagcctggacaacatagcaagaccttgtctctaaaaaatttttcttaaaaataaagaaaaaactaaaaaaaaaaaaaaaaaaaagccagagcaagactggtccttgatcaaaatagttttttaagcttcatgttcagataggggattaagatacgaacttttggtttgttacattaggcattgttaaaaaaaaaatttcaggcatattaaatttaacagattttaattgagcaaagaacagtttgagaatccagcaacattgcgcttccctggaatgagaataggttcagagaccctgatgctgctgtgtggccaaagacggtttatggacagaaaatgggaagtgacttacagaaaacagaagttaggtacagaaatagctgaattggttactgctcagtgtttgccttatttgaacacaatttgaagagttggcctctttgattggccgaaagtcagtgattgatacaagagtaagttacagtctgtttacacatctagttaggttatagctcattatgtatgaagaaacctttaggctgttaaacttaatttaacagcatgcatgtaaaatgtcaagcgtaaccggtaaaagaacagaaatgcagtgattaacatcccaacccatcccaagtgaggaaataaatgcagtaagaaaacaaagaacactatcattactcaatcagacgactaattaaaaggcatgaaaaagtacgtagtaaaaatgtgaaaacaaagccaggtattttagaaatgatgatttttaaaaggtaaatcgctatcagtaataaactaataaactatattttattaattttagagctctagaataaatagcacatagttattcaaaaatgtatttctttaaaagcttagctattgatatgatttggatgtttgttccctccaaatctcttgttgaaatgtgatttgcaatgttggaagtggggcctggtggaaggtgactggatcatgacggcgggtccctcatgaacggcttagcaccatcaccttggtgataagtgagttctagctcagttagttcatgtgagatctggttgtttaaaagtgtgtggcacctcccaacccactcttgctcttgctctcaccatgtgacgtgatggctgcccatcgccttccaccaatgattgtgagcttcctgaggcctccccagaagcaaatgccagcaccatgcttcctgtacagcccacagaaccgtgagcccattaaacctcttttctttataaattacccagcctcaggtgtttcttttctttctttcctttctttcttcctttctttctctttctttcttttttcagggtctggctcttttgcccagactggagtgcagtggtgtgatctcggcacacctcagcctcaacctcccaggctcaagggaccctcctgcctcagctccttgagtagctgagactacaggcgcaagccaccaggcccagcgaattcttgtattttttgtttttagagatgaggtctcactttgttgcccagctggtctcgaactcctggactcaagggatctgtccacttcagcctcccaaagtgttgggattacaggtgtgagccactgtgcttggcctcaggcatttcttcattaatagcattgcaagaatggcctaatgtagctatttttatacaaaaagatgagctatttacaagtcattctttgctacccacctctatatttgtcaaaaatttgaagcataatatagatttcttatatgatcataaacggcttaaatttgttacatttctgtgtgtcaaggaatggtgctgagttccaagatgataccagtttttacaggtttgtggccatcttcgaaatgtctgcttaataggccttctttttaaagaagacaaatcatcactgaaaattgaagagaaaaatcgagtgttatttatatgaaacttaaacatgtgacattatgtattcttcttctttgggtacttcccagatgtgattatgatctacatagttttgctaagacaactcaataatttgtaaagaggcttagcattaaaatgttccctatttgtgattacccattgtactttaaaattgttcctgctaatttttcatttctgatgatccaagtgaagagtatttgccaaacacccacagtatcaaatctaagatgctaaaggcagcctgcaaagggaacaaagggaaacgaattctagaggagactctacaagttaaggttctatgtaattgttgggtagatgcaaaacggactggaggaaacattgcttttgatacacctgctgaatagttccctttaagggttgtcctccctcacccccaaagaaattggattactaggttgggctaggtggctcatgtctgtaatcccagcactttgggaggccgaggcaggtggatcacgaggtcaggagatcgagaccatcctgactaacaaggtgaaaccccgtctctactaaaaatacaaaaaattagccgggcgtggtggcgggcgcctgtagtcccagctgcttgggaggctgaggcaggagaatgccgtgaacccaggaggcggagcttgcagtgagccgagatcacgccactgcactccagcctgggcagcagagcgagactccatctcaaaaaaaaaaaaaaaaaaaaagaaagaaagaaaagaaattggattactaatctgagacttcagagtagatgatgggtaaactgattgatgatgctagtcttctaagtatgtttgtttatattctacctcactccacaaaagatttgagtgtgtttataacatgcaatttcctctaagttgaaaaaaaacgaatgaaaaaacagagtggtggaaaatatataaagaaaaggcatataggctgggctcagtagctcatgcctgtaatcctaacactttgggaggccaaggtgggaggatcacttgaagcctagaattcgagaccagcctgggcaagggagaccccatctctacaaaaaacaaaaaaccttagccggtacaatggtgtgctcctgtagtcccagctacttgggaggctgaggtgggaggatcacttgagtcctggagtttgagggtacagtgtgctgtgatcatgccactgttctccagtctggacaacagagcaagaacttgtctctcggggaaaaggaaaagaaaaagaaaaaaaaaaagaatagtaatataaatctaggccagatgtctctaaacttggcagtggtgcattaggatcacctggggaacttttaaagctcctgatgcccatgtggcaccctgtactaattaaatcataacgcctgggagtgggaggcagagaggagcagtagtaaaaattcccaaatgtttctatgtatagcaaaatttggaaactaagctgatgttctcagccttaaatgcacattagcatcacctgggaggctgttgaaactactgatgtcagaatccattaaatcatagcctctgatgctggttaccgggcacttagtctatttgaaagctccccaggtgattgcaatgtacatgctgagtagagaaccacagcactgggggaaagttggtatatagttacaaaagggattttttttaatgggttcttttatggcttaagaccatgaaactggttctgagcttcctggtggccaaagtagatagaaaaacacagtcggttttaataattttggtcatctgccatgcaaaagcttaccagtttcttgaaagcaaaagagcttttcttcatagatctgaaataaatgtctagtttattagtcttctcacagaggatgttgatgtcatggatcacgattttataaacaccccacaataagtgacatatggcaagtttcatattatagttcctaataaccatccctcagggaaagacaaggacatgaccctgagtgcagggctataggctgttgcggtgggtgtgtgggagtagatgataaaagacaggaagagaaactgccacacccctctacagtttccagataacatagccttacccaaaggcgaagcctggaattgtgtacctccaggatgtggaaggcgtgtcctgtgtaattagaaattataattttctatcagcacattttaagaattatttatttatgtatttatttatttagagacacagggtctttctctgtcatccaggctggagtgcaatggcacgatcatagctcactgtaaccttgaacttctgggctcaagtgaacctctagtcttagcctcctgagtagctaggactatgggcccatgccaccacacctggcaaatttttaatttttttttttttttgtagggacaggggtctctctatattgcccaggctggtctcgaactcctggcctcaaatgatcctcctgcctctgcctcccaaaatgctagcattattattcaattacttttcttcctttataatataaactgtacaaattttacaaaggtttggctagtgagggtaggtagagaagcactgactcccatccatgagggtcacaggctagggcaagggcatctgagaatgcgtgtgtgtgtgtgtgtgtgtgtgtgagagagagagagagaaagacagagtgtgcacgtgtaccttttgtttatcaaaagactttagggttgtttttttttgtttttgttttttttgagacggagtctcgctctgtggtccaggctggagtgcagtggcgcagtctcggctcactgcaacctccgcctcccaggttcaagggatcctcatgcctcagcctccccgagtagctgggattacaggcgcccgccaccacgcctgggtaatttttgtatttttagtagagatggagtttcaccacattggccagctggtcttgaactaccgatcttatgatccgcccgcctcagcctcccaaagtgctgggattacaggtttgagccaccgtgcccggtctaaagactcgaggtttgaaagggttgaaaaacctcagtattgaaagaatggacagaaatctgacttttaaatagtcctccataaatagttctcattgggggttttgtggcctgtaagtactgtggacttgacggctcaagacttctagagaaggcttctgagtaggatgttgactccatggggctaagtcgtcaaaggaaacccattctacggcacaggttttaagccagtcatgctgcaggaaggcaaaggagagcttaaggtagcatgggtgggctcttttgaaaacgaactagcagggcgaacagcagatatttagttatgtagctggcaacgaggaatatgattccttcgggtcacgcgagttctctctgaacttccttgaatgaaaatcctaaatgcatcctggtaatacccaagtaggcactttgacgtttccttttcaaaggcaaatggaatgttctgcgtctgttttctttttgaactcccaactgcacttaacatctaaatttaaggaaaggcttccgaaaaagtcgactgacgaatttctttcacttatttaaagtagtctcttgcagtcctataaatcggaaggattaaatgaactgcttgctagagaaacggtagctgggtggtgggaagaatcctacggtggctaataagacgtctcgatcatttgcatatgcaaaggataaccttaagcttgagtttgatatttcacgttgcggctcacaaatgaactgctttttattcaaagaaccatgctgtctgttttcgcgtgggtgggtgtgtaaccggggcgggcgctatgttggttttgttccctgcaaggttgacacaggcaatggcgacttgcggccacactggggcagcctctcctcggctggcagccgggccgggcggctcgctcccgggagctgacaatgtagccaagtcctgctcgtcggggccgcaaagaatttaaaggggtctagaaacatccatcttttccccttttcacagttaacagcgagctcagggctctcggtaaaaagaccaccgggaggaagaaacgctcagggcgtttttgttattgttcgcaaaatcctctatcgcccccaaacgtccagcccgccccctccctaaagcggagggaaaccgggagaggagggagggtcggcggcgccggccaagcgcgccagtacacgcccctgcggatccgccccgcggccgggtgacccccgccgcgccgcgctggaggccccgggccggggtgggcgtggggctgaactccgccacccccgcagcccgcggcccgctcgccagcccggcctgtgattggcttggggggcgcgtgtgcccgccccggcgaacggggagggtaccctcgcggcgccggtgggaggaggcggaggagggggcggagagagcgggggcccggacggcgctagcgaggaggcgggcgagccgggtccccgggagcgcagaggaggctcggaggggggcggagagcggcggggcgggagggaggcgcgggtcgcggggagggaaagcccggccgggtctgcgccgccgccgcgcgcagtgagaggcgccggggctgccgcccggtgctcggcgcgctctcgggagccgcccgcccgctggtcccgcagccttccgggaggaagcggtgccggcagcgtccagggcgcgctctcgggcaccctcacctgccggcgcccggccgcttacccggcagggcgtgcgcagggtagggtgcgggaccggggggacctggaggcagaggggagaaccggccgtccgcgccgcagcacagccgctgggagcgcctcagaccccgcgcggggcgccggctccatggcgaccgggctcggggagccggtctatggactttccgaagacgaggtgagtggcacccccttcctgctcgggactccccggggagttcctatcccgcgccggcagggggaggggaaaggggccgtccccggggtgctcgtgcccagcgtctgcaggggagccccaaagcgggagcgccccggagcgggatccaggggagcttgggtccttccgcaccccccaccctccgcaagccgagctcattgtttgtaaataaagcggcgcgacgcccttggagctgggggttcactccgcagctcctcgctttcgggaggagagggagggggcatgcgtgcctctcttccctcttcctctccaagcagcgtctcccggggctgttgggcaactttccgcctctcgcccctgcagcccgggagtccatgatgcatgtcacgtctgggtcgcgcggctggagacccgggactgcggagaagccggatcgtttccccctggaactttctctctcatgattgtgtggatcagcaggcgctcagaagcctgtgcgtgcttatcccggcgggaatgggggacacgctgcgtgtgtccctcccctcgttttgcaaagtctacggccaggattgtggatttcggagcctcggtgggggaggtgttcaaggctggtggcaggtgctcctggaaacttggggaggaagcttgcagccctgccattttttcctcccgaggattcaaagcccggcacctccagggtgggtggggagaggaaagcttaattgatctcttttattaataaagcgactgaataagccacgcctcccaggcggtcggtttcactggaaagggctttgtttttaccttcattctctcttccgtgtctcccactccccccttttgaaacaatcctgctaaatcactgcctagtcctctctcgaccagccacgctcggctcttattggtatgttgctctgccaaaaaggggggtgggacgcttgtcgcgggcgcggcgtgacaggcaggctggatggagcaggtaggagtggtttgccatctggcggggtgcgcgctcaggtctggctcccctttcgagaggtgaattttacaacccaagaagcattactcagcagggaggtatttcctatcctggttgtgcatttcatgaaaagttgatgcctggaaattcaggcgttctcgatttctctttcttcccctccctcctttcttttcagaggttccctctttctctcgtgttgggggtggggttggaagaaaggctattatctgagacaggctcgcgttatggctccgctttctgcggctctcctaccctggcatggtgtgtgtgtgtgcctgtgtgctacgtaagtgtggaatgaaaggtattttggggtgggaagggtgtttagggtatgaatttttttcttagcggtgctaggcaaagcttgatgtatttatttgatcaaagaatgatcacagtgcaaataatgtgtgatttgtgtgtttattttgcctcgctgtgcttttgtaaaataatttcccgttttgtgtaactacctggggataggtgacagtagcattgtttcattgacccggggggcttctcctctccctcctggcttctctctttgaggagctttcccttgcatcctctacttctccatttaattagtggcagtagagggcaggccctgagttgcagagacgcagacattcctaaacaaaggggctgcttgggttgacgtattgtggggggtgggggtgaggacagctgcatttcatcctaggttcttttaaaaaatgttttaataacatgattatttgtaaaaactcccccgaaaaaacgattttaagagtgttttgggaagtgcagctggataaatgaaacacgttaatgtcactgttgtttgtgctttatttacattggcagtgagtgtcagaatctacctagagcacatcttgccacttttgtccacaggagtcactactaatcatcataactgatgtctagtgtgaaagtgaagcttggaatgtaaacagagtccgagtgtgtgttggcatgtgactggattcactcctgcatgttgctagaagggaatttggggctgtataggaaatagcaagaggtgatgaagacaccttttattatctatttattgccatgtcgctggtagtatttagttccacacacattgtatttcacaagatgagtctcagccgtcttcctttttcaactttctcctaccagtgaaaaaataagccagggcagttctgatgacttcacatttcattggtatttgtttttcatgggcagtttcatgctgtcacgttgcccttcagagaatcagggaatgccttcgtagaatattaacgacaaattgttgaatttgcacagcttgttttgtctccctgaattagtatgtgtaagaaaaaccaatggaagattttagcaggctctgaaagtagaatgcccgctgaagcaaacggcagggttgttcttccaaggcgtattaaatatgggtacacttagtttgcagacttggtgtgctgcagaatatcacatatgaagatattttgaccgctatttagaagagtgacctcataaatcttttagcaaagtagacacacatacctaccacatttcttaaaagtagattcgtattttgatttgagattgttgaaaagcatggtatgtttggagtgcacttagttatgtcccatctcataaagactgttgagctctctgcactgctgatgatgaagcattgcatgaacccagaaaacggggatgccaaagcacagggcttaggtgctgttccttgcgtcatcagcagaggtctgtccactttgtagaaggtaaggggttgagatgtgggctttgcttgtgtgaatgtatgtgctgtttaattttttctgtgtgtttcgggcggaggtttctctggtgagttataattcatatttaccctgatttaagtcatgtcactttaggtagccagattcaaaaccatcagatgaaggacttttggtgttagagggattagcagtttaacaaaacttctgattcatggcccaagatcagatttggtttggaatcagaacactttggactagtttctgcatctggcttgagtccttgtggatttcttgttttatttctttatttttggcaatctgtagtgcattttggcatagtttacttatgaatgttaccgctaactttctgaaatcttttattccattttagaaaggtatcatttattgaaaagatttttctactgaacaaaatactgggattgaatggcagcttcttatcacattagatatgacattaagtaatttcgttagtagttaaaatgaagcaaatggcatagaaatgaaggccaggctgacataggataaatggcaccttctctccttatcctgtacaaacacggatagttggctacttttgaatgcctcttctataccaatggtaaaaatccggcttaattggggccacattctagcctagtcacaatcagtggcttgcattatgtcctttgagatgtggcagatctgcttataggtgccagtcaccacggctccctgctggcttgggggtctttctactcatttacatataattatctacttcttaatcaaccattaaggttaacttttggcatggatcctgtatgcttttcagtttaagatgctgtcacttttaagatgcgccatgagagcaaagtgctaagccttgtgcacatactatgtcatttagttctcatgagaactgtgtgaggtaggctgtgatttacagatgaggaatgaaagctcaaagaggttacgtgacctgcataaggacacaaaacaagttaagttatggagccagctattttgaatagaaaggcctagtttttaacatgctgaatatcctccccttctgacaaatgccttgaaaggtcttactatctagattatttaagataatgtaagagaaataaacaccactggttgcaaactgatggctgctgggcccgatttgaccaggaaccctgcttaatgtggtctctagagtgttttaaagcttggaaatttcatgaaaatggtaaaaatctggcttaattggggccacattctaacctagttacagtcagtggctggcattatgtcctttgagatgtggcagctagttgtgctatggttgcagtcaccactactttctgttgtcttaggggtctttctacttgtttacatataattatccacttcataacaaacctttaaggctaacctttggcgtggatgccatatttctttcactttagtgtgctgtcacttttaagatatgccattatttcatgtaccacgaagaaaaaattgctgtcaagttatgacatactgtccatcttatgaagcatccttatttcagagaagttgaaatatgagaaaaaggatattttagaattgatgaattacagtgactagaaacctgggaaaactccatgccatcagtttcaatatccccaatcattcagtacttttaagtcaacgagtagtcagatttctgcttttctgtgtttgaggaaagtgctagaaaaagagaagtgctcttaaataggcattagcacagaaggaactgggggcctagatcatagccaactggatggccgtctgtaagtgattaagaatagttgttagtttttaaaaagtggcctgtgtgtattttcaagagattacttgggaaaccctatgtgccatctttgcagctgtgcaaaacggtgaggacaagattgctttcaaaaattgtggtttagattttgcttggatctcaaggtgaatgctgacaggccgttttctgaagagagagaaggcttgcccagtcatgccaagtccaagtgcctgtgtcgggcctagatgctggatggtagactgtatacccaggacatataggtaatgtttgagaaacaaatgttaaaaggacctagttttcatggtgacatttaaaatcagtttttaaaattcatgaatataacatgttgttttaaaatttgattatagggaccgggtgcagtgatcactcctgtaatcctagcattttgggaggccgaggcaggagaatcacttgagttcaggagtttgaggccaggctgggcaacgtggtgaaaccccgtctctacaaaaaatagaaaagttagccaaacatggcggcacgtgcctgtagtcccagctacttgggaggctgaggtggaaggatcacttaaacctggaggcagaggttgcagtgagccaagatcatgccactgcactctagcctgggcgacagagtgagaccctgtctccaaaaaaaaaaaaaaaaaaaaaaagactaatgaatagaatttattttcttcaatgatgtagtgtctgtggaatttgtagacattgacatttgaattttcattatatttagttttattaaatcagaatgttatgattgtttatttcattattgaacatcagtttccttaatttaaggaataaaaataattttgctcaggccagacatagtggctcacatctgtaatcccagcacgttggaggccaaggctggtggatcacttgaggtcaggagtttgagaccagcccagccaacatggtgaaaccctgtctctacaaaataaataaataaataaatgaaaaaaaaatcagctgggtgtggtggtggacacctgtaatcccagctactctggaggctgaggcaggagaatagcttgaaccctgaaggcagagattgcagtgagccgagatcgcaccactgcactccagactgggtgacagagtgagactctgtcacaataataacaggctggggcagtggctcatgcccgtaatcccagcactttgggaggccgaggctggaggatcacctgaggtcaggagtttgagaccagcctggccaacatggtgaaactccgtctttactaaaaatacaaaaattagctgggcttggtggcaggcaactgtaatcccagttactcgggaggctgaggcaggagaattgcttgaacctgggaggcagaggttgcagtgagacaagttcgggccattgtgctccagcctgggcaacaagagcaaaactaaaaataaaaaataaaaaaagaatagtaatagttttgcttaaagggtgaggacagtgacaaatggtgatcctcagatgactgtagtttctttaccattacagaatgcaattcaaatgaaaaccattgcatggtactcaggcatttcttcaatgcagtgtgtgcccacatcaccaggaagcttacttgggaaagtttgttttgggattctggagtacctcaatatatctggtatattttcccaagaaaagtgaataatcttggggggccgaggtggacagattgcttgagcccaggagtttgacaccagcctgggcaatgtggtgaaaccccacctctacaaaaaatacaaaaacttagttgcgtgttgtggcacgcacctgtggtcctggctgctggggaggctgaggtgggaggatggcttgagcctgggaggttgaggctgcagtgagccatgatcatgccactgcactccagcctgggtgacagagcaagacactgtctcagaaaacaaaggcaaacaaacaaagatcaccccaaagaagaactcccaacatattaaaagtcattgagttttgtacccttcaaatggatgaattgtgttgtgtatgaattacatctgaataaaactgtttaaaaatattaagaatgattgagtgtgacattattgcagcagtacattggagtttctgctaaattacttttgcattcatttcaaaaggaagcaactatgcccattgctaatttaataacctgtttgcttgtgcggtgtttaaaatggcatcatgaaaacatggcaatgtgtgatagattaagagccaattaaattttttattttgagttacaagatctgcattaaacagattttattgttgcccttgaatttccagtcttagatgagtagcagcagtgaaaaaaagagatcctaacttaagagttttcaagctttttgatgttgcaggtatttgaataagtgggtctgtcttactgaaatatttgttaattagcgataaagcaaactatatgttgatcttttggtagtccatgctaaggaggattagaataatatataaataatataatggtaataagtatcagggcaggaggattaaagaagggtggaagaagtgtgacaaaatgttactttctgtttttacattgtttctcttccaggtcacaactgtatttcaaatgtatttcattttcagactataggtggcaatgtttgtgctgttcactgtttaatgttactgttggctcgggtgttgcttgttgctggaatatggaaatgatagcataatttagagttgagaataaaaaaaactagatttagaaaactagaaactagatttagatttagtagagactttctaaatagtcctagttctgctgtgtggacccttctgtaactttctgttactctgagaaggagctgataattatcacaactactggtgtttgattagcagagacattcttgattcctgatgcaagaccgtggctgaagttgtagcagggcgtttggtggttggcgatgtaaagatctgggcctcttgtttcatgaataatagaatctcactatgattgtaatattttgttttgaactggagtgctgattattgtaatccctttaggtgagaaaagccttattatataagtgtatctggggtaactagcttaaatttgacactccagtcaactttttgtccctgacttcagtcctgcattgattcaaaacgcaccaagttaaatgtcaaggctctcagattcccttgctgtcatcaaattcagtgtttggtgacttcttggcaggcagacatctaccaagagattttgtattctttttatacctcctattcaccaaaagaaaagggccattcaaaagtgagtttttctttttttttttttttaagtttaaaaagctatgatgtggccacccatggtggctcatgcctataatcctagcactttgggaggccagggcaggcagatcacttcaggccaggagttcaagaccagcctgaccaacatggcaaaaccccgtttctactaaaaatacaaaaattagctgggcgtcgtggcgtgcccctgtaatcccagctacttgggaggctgaagcaggagaatcgcttgaacctgggagatggaggttgtggtgagctgagattgcaactctgcactccaccctgggtgacagagtgagactttgtctcaaaaaaaagctgtgatgtgaaacctgttctgtgaaggtggaacttggaaaggcttgtaaggatggtggtcccatgaagaggatgaacaaaccaagggaactgtcctcttgctggtttgggtgatgtcccatcacctgtcactttgtttgtttgggctgcagtggaccaatggtttcccaggcacactgaagtgacatgtagatggattgcttgagtggctccggcatgtttccatctcctgtctaccaggcagagaccgtgttccctgttttgaggggatccagaagtgcagtgacaagggcctgatttgcatctccagctcctggtcttgcctgtgttaacaattttttttttttctttccagatggagtctcactctgtcgcccaggctggagtgcagtggtgcaatctcggctcactgcaagctctgcctcccgggttcacgccattcgcctgcctcagcctcccaagtagctgggactacaggtgcccaccaccacgcccggctaatttttttgtatttttagtagagacggggtttcaccatgttaggcaggatggtctcgaactcctgaccttgtgatccacctgcctcggcctcccaaagtgctgggattacaggcatgagccaccgtgcccggccaacaatttttacattctaattaatttccagtttccaacctgactcaaggtttagctcttcgtctcttgggtgcagttttggatcatgtcttataatgtatatttaaaagtgtgttgtaaagctggaattcccattgtgggtaaatgctgagattgttgtaatactgagaagtgcacttgggaaccatggccaacactgccctagctgaccggaggttgcactgagttgtcccctttgaacatctgttatgaatgaatgttggaaaatgcaaagccaatcatttcttttacctgacctatgtgatgttaagttttagttttatgttttggcaagtgagtgttggatgtcactaatgtgaggaggccggtgagggcagactttgggtcagaggtaatgtaggagatgaagaccctttctattaatttttcttgtttaattgaagatgttcgtgttgaatgggttttatttacatgtataagttctttttttcttaatgctggaagttactttggtttttcagaaaatgcaagtaaccctaatctatttagagaattactttgcttagtaagcactcagtactatttagtaatggggaaaaaatgtgtttgtgtcccacagcgtgacaggctccacaaacttacttacgaatctcctaactaccctgagaacctgaagaatgggactttgtggagaatcttctgctttctttgctagtctctatttttccttctcagttattaagtgagttgtctttgggtgtcctcatcatgctgacttcatcttgcccagtttgttttgggtagaggaaggagtgcaaggtttaaaggaaaagcaaagcctgtacaacatggtgagaccccatgcctgtggtcccagctacttgagaggcccaggtggaaagataatttgagcaccggggttcaggaatgcgctgagtaatgattgcaccaccgcactcgagtctgggcaacagaatgagacctcatttcaaaagaaaaagaaaaagcaagactgaatcatttcactttgtattctcctccttgctctcattccttttgtgcttcatgcattgtgtgtgacaattggatgcagccgtaattattgtcagtaacttggtttttaagcttcagactgtatttcctcctcacttgttaacaccagaagataaatgaatgtggctcttggattgaactacatctacagggagctgaacttcccatgttgacgttgaattctagagtatgcttatgctgattcttgagaaattggtatgtgccgtgcctttggaattgataccttaattttcagtgaatattattggtattattattaaagagaacactttaagccaggagtaagagcttttcctccttttgagaagtgaggtacagaagagtatactgcagctgtgggagtgatgggtggggtggggcagtgttgaagaatatttaataccacgaagatgtcaccagtataatattaaatagaaaaagtaggttataagacagtggatccagtagaatcctattgtggttaagtgtttatatgtagagaaaatgactaggggctaggcacagtggctcacgcctgtaatctgaaccactttgggagatagaggtgggaggatcacttgaacccaggagttcaagaccagcctgggcaacatagtgagactctgtctctataaaacaagaaaaaagaaaaactaactagggatatattccagcatgttagtggaggttatctttgagcaaaggggattataggtaattttttattgtcttgtgttttgcttacatgtgttttctatatttctacaataaacctttttttcttaatataaaagtaagtttaaaagtgagtttaaaaatccctgaaaggcatgtacttcaagcttcaagtgaaagttatagtacttgttcagcacaaatactgatatagtgtttgttcagtggaacacttatttagggtctgccttgtgttttgtgtctaaggattaccaggtcattttcatattaggagctcaccactacgttgggagttggagagatagagcaaggactattttaaggaaaaaatgactggtaaattgtatttctttttccccacttgcagtttgcaaaatagatgtttcatttctctccactgtggacacttaaagtttgaatttccatccttctgtgcactccagttgcgtgaaagtaatttacattgctagtagtggtttgggttctctgaaattttttgtgtgtgctatggaaattgtctcctgtgatcagactcaaatccatttctccttattattgttttcttaggttttgagttagagaccttttcatgaccgtataaggtgttgaataggtttagatatcaaagtgatagctatgcatagctatactcacctgtgagcggtcagctcttcagtgtttctttcaactgacttgtaatatccagccactgttgggtgtgacctaaagtgtatctcttcccaaacagaagggaggagttgacaaacaccatgttacttttaatcagagacttgtccttgtcccccttcccccagccttttaataattctgaattcatgttgcagtcgatatgtgtttaaagtgttggtaggtttcttgtactcacaccatcctcctccactcctctcacccccaaaaagtgacagctgacagttgatggcatcttagaattgtgaggcttgagttggtctgtctcaattcgtgttttatggtggcccataaattgtgaaagataattgatagttgtcatgggaactagttatgttgttcagctatgatgtctcaattaggaaatgttcacctagacagtagggaaatgggccagctcagggatgtcttcaggaaccaggttcattgttttttctgctttcccttctacagcctggctctttccagggcttcttggtcctaggctggctgccactgacagagctatgcctttttttatttttttactttttttcaagacagtctcactctgtagcccaagcaagagtgcagtgacaccatcttggttcactgcaacctccacctcctgggtttaagcgattctcctgccccatcctcccgagtagctgggactacaggcatgtaccaccacacccagctaatttttgtatttttaatggagatggggtttcaccatgttggccaggctggtcttgagctcctgacctcaagtgatccacctgcctcggcctaccaaagtgctgggattacaggtgtgagccaccatgcccagccagagctatgccctcttttttttttttttttgtttgtttgtttataactgtgtacttgtaaaggaaagagaacggcctcctgtgccttaaatcttctgttgtgtctcagggcccacagaggctgagatctgttcatcctgcaaccagtcaccgtggcaaggaggagatagaattacctttttttcttaccttttgagccaggggtaaagtcaggcacggtgaccctgcattccacaccttggataatccatccaccttcagaaatgcccctggcttcgtgaaatgcacatgctccctttctccagggaggtgacccgaatatgcagctaagtattgcaaggatttctgggtaatattacacctgaaaggaggttttttttttttttaattatctggtgatttatgactaaataggctatgtctctcaaaacattgaacctgcaatgggcaagaaagaacaggatgactacaatgaaccttctatttggaaaaggggaaaataagacactcacagtggggtagctggctgaacaggaacagctgggagcgtttgctttggtcagccggtctggcagcttgcctctgctgaagtccgtccagggtgagaatctcgcttggtcattgtcctctgcagctgcacctggatggggtaggcactggcaaagctccttttcttgggtgctgcttggcattagtctggggcttcaggattggttgtcttggggttgaatagccacaggcttgttccagccttactgagaatgtctttggcaaaactgctcccaggaaaactcaggctctgagttttgtgtctagtcaattccatgggctggtaatggcagccagtgatctcacctagatgaggtctgtggttctgggaattcctgggtcttaacagtaagtcccacagccctgctaatccccaccacatctgccttgaggcaattttaaaatagcctagaatgaagaggcacacagttttgggtctaacagacaacaggggcagtttaacccactctgcttttgctctctggtgtatcaagaatgagcaacttccccacactgggattgtgggactctgagtacccacttcccttcactcagccattccaatttcttaaagcaatttttaaaaaatggtggtaaggccggccgcggtggctcacgcctgtaatcccagcactttgggaggctgaggcaggtggatcacgaggtcaggaggtagagaccatcctggccaatatggtgaaaccccgtctctactaaaaatacaaaaattagctgggtgtggtggcacgcacctgtaatcccagcctctcgggaggctgaggcaggagaatcgcttgaacctgagaggcggagattgcagtgagccaagatggtgccactgcactctagcctggcgacagagcgagactccatctcaaaaaggtggtaaaatacacatgacaaaatggactctcttagccacattaaagtgtatggtttggtggcattacatgcatgcacactgttggcagccatcacccctgtctagccatggaactctttcatcttgcaaaactggaaatgccttactcgtgaaccagtacctccccattcccagccattccagtttcttgtagcgcatcttctctttgatacaaaatctttgatagggttttgattgcaggcaacagcaattgaatctgatgaattcaacagagaaagaattaactgaaggaatttggggtagcactggagtacttgtcacactggagagacaggcctggacaggggtcagggaccaatgaagcctgggcatccagaatcacagctgttagtgtgttttattatttaagagtgagctcagaggtcactgttcaaagctgggcactctgtctccaactatccctcttcacatcccagactcaatagcacctttctgcatagttacttctactgaatacttcactgacagcaatgaaggattgttggtttatgtgtctgtctcgtatagattaggcacctcttcagagccacagccacatcccaatgatttatctccagtcccaagcaccgaatcagaccccttgaccgtttactccattcaagtgatgatctcaggttagataatcatgaggtcagttggtcaaagcaaaaacatctttttaaatgtctttttgaattctaatttgtttatgcaatatagattactcctcctattttcttcttctttcttttttttccttaagagatgggatctcagtatgttggccaggctggcctctaactcctgggctcagcggtttctcccaccttggtttcctaaagttcagggatgacacgtgtgagccaccgtgctcagcccctcctcctattttctagtctgtgtcattactgagaattttactctttattctctttcctcaaattctaagtgaaaagacctctcctctctaggccccaagaaaggcaaatgtgttccacggaagaaggttgcagacccatgtttgattgctttataccatatttcccccccagaggctcttaaaagggcaaagaaggtgttgaaactgccactgtcaataccagagcatctgcttgaaaccaatgtttcttttgtgactccaggatccatgctgcctggctaagaagggcagtgtcctccttgcccaggtgttaaaccacaacagacctagaaaactgagatgtcactcctcccctggagtgacagcagtgttaggaagtttggaatctgccaacccacctcatcctgtccatgaagttgtcacttggctaggtgttgatgtaaatgtgctacagaaacaaactcacctcttgtgggacatggtgactctggttagtaacaatgtattcttcaaaattgccaagacagtagattttaaatgttcttcgtatgcaaacttggtaagtatgtggggtaatgcataggttaactagcttgaattaaccattccgcagtgtgtatgtatttcgaaataacatgtacatgacaaacagatacaattttcatcaattaaaataaacatttagaaaaataacataaatcctcacaatagccctttgaggtaggtgctgtcattttataggtggggaaactgaggttcaaggaggttaaataacttgcccagggtcacagaactacttagtaagtggctgagccaggacttgaacaagcagtccggttgtagacacccggagtggaaccatcacgctgtggtgtgtccgggagtgcttcaagcaggggttggttgggggtggggttggggtggggaaggcacagctgaggcctgagtggccagactgtaaaagccaaaggaagaagtggctggatgtgaacagctttgtggacctcatcaaggagctgggactatattgtttgaggcaccttgagaaacctgttgagatctgggcttttcttattagtaagtatgttgcccagactggtctcgaacccctggcctcaggtaatcctcccatctcagccttctgagtcgctgggattacaggtgcaagtcgttgggcccggcaatctgggcttttctaaagctcaccatgcagctttggggagattggatttgagttggacaaccctaggcagttgcagagctgtccaggcagaaatggtgatgacggtgaaaatgagccaggggataaggcaggaggtatttaggaggcagattccattggatttggtcactgattgattaggtacaaaaaaagggaggtgtctagaataatccctaggtttcttcagaggactaggtagatgggaggaggggaagaagcctatctctattaaatacttagtacagtggctctaaactggggcctgtcttgcacccttccttctcccctaggggacatttggcaatgcctggagacttttttttgagacggagttttgctcttgttgcgcaggctggagtgcaatggcgtgatctcagctcactacaacctccgcctcctgggttcaagcgattctcctgcctcagcctcacgagtagctggggttacaggtgcctgccaccacacccagctaattgttgtattttttagtagaaatggggtttcaccatgttggtcaggctggtctcaaactcctgacctcaagtgatgtaccggtctcggcctcccaaagtgctgggattacaggcgtgagccactgtgcccggccgcctggagacatttttgattgtcacagcttaggagatgcctctgacatctagaaggtggaggccagagatgcagcagaacatcttacacggcacagtacagctcccacaacgatcatctcgccccaaatgctgccgaggttgagaaaccctgctgtagtgtagtatcagttttacgtggttatctaattggatccgtgagccagtcatgttagatcataaatatgatttttcctgtttttcagataaaaaactgaggcatagacaggatgggtcacttggccaaagctctgcagctagtaagtgttagagccagaatttgaacgcaagtcttccagatgtcagaatctactccttctgcttaccctgctgcttcatatctcacagtgatgccaaggaagatgcacattggactgtgggttgttttttttttttttctttctgtcatggtggctccagactagaggaggcaggaaggaaggtggttatttatagtcagctgtgcataggatcgatttttttcaatcctgaaggacttgcagcaggtagttcaaagaaacctcctttagacgttgactttcccttgcagttgtaaatatgggaacatttaccatcttttgctttaaaatatactgttataattaaggtaaaatgtaaaacttataacttaaaaactttactccctgtgcatatgaactatggcaagcttctcaaattaattactatccctttgggataaattaaaatattttgatttgctagaggtaaggagcccttttgagaattagtttgttttagttgagaatgattagagggctagaatgatatatagctctaaataggaaggtttctgattcttttggctactctccacttttactggttattttccagttctgggaagattctgcatgtatgtagcagcctcccttggctatccatggtattagagctctagggacagagttctcctagttgaactcttcataatatctcattattggtattttcaaagttatatgtgtattttaagatagtctttggatgatgttccaaagaaggctgctttgttgagattgagatagttgttttgcagttgtgatttctctttgtaaaaagaagtctttgtgtcggtcccaggtcttattttttgcttgatcacccagtacgtgggtgcacttgggctgttgggaccatctggtgagtgtgaggtctctgtacttcacctgtggagtctgttgtcctgaaaggtgccggctcaggtggtggtgctttgaggggagcttgtttgctgcaccttccagtctgctagaaaatagatgcttagaggggcatttcggggtggaatctgatcatggagtttggtgagcaaacagggcctcaagttttatgttgtgagaaataaatactgagtttatgttttaattatggcacagattaatacaaaatctggtgaaaaatggagaaaaggagagcttaaaacttagctgtttgttgctgtcatctaaatgtagttggtagccagcctagatgggaccacagcatggcactaaagcgcggctgctgcttttcagatcccatgttcatattcgcatgtgtggagcatgaaagtaccaatagaaaattttgacaaagaaattgaagggttgggccagggacggtggctcacgcctataatcccagcactttgagaggctgaggcaggcagatcacgaggtcaggaaattgagaccatcttggctaacacggtgaaaccccgtctctgctaaaaatataaaaaattagccgggccttgtgacaggcgcctgtagtcccagctactcgggagtctgaggcaggaaaatggcatgaacccgggaggcagagcttgcagttagccgagattgtgccactgcactccagcctgggcgacagagcgaaactccatctcaaaaaaaaaaaaaaaaagaaatcgaagggtcgataatttcatttatttgttcttttttttttttttttttttttttgagacagtatctcactctgttgcccaggctggagtgcagtggcgttatcacggttcactgtagccttgacctccgaagtccacacgatcctcctaccacagcctcccaagcagctgggactacaggcactcgccaccatgcctggctaattttttatttttatttttattttttgtagagacaagttcgtgctgtgttgcccaggctggtctcgaactcctgggctcaggcagtcatcctgcctcagcttcccaaattgctggatttattgtcatgagccaccacacctggccagggtcagtaagttaaaagataccttctaaactcagcccaatattgaagagtaaacataaaaatacatgttttgtctattatactattactgttactcaatgcttaactaattgtgcttatgtttttttctttgccaaaatttctcttcaaggagcaagtttttctaatattgcttttcttgggaagaacaattagtcacgagatagtacagcttttttttttttttgagacagattctcactctgtcatccaggctggagtgcagtggtgcgatctcggctcactgtaacctccacctgccgggttcaagtgattctcctgcctcagcctcccgagtagctgggactacaggcactcgccaccatgcccggctaatttttgtattttttgtagagacggggtttcaccatattgtctcgaactcctgaccttgtgatccacccgcctcggcctcccaaagtgctgggattacaggcgtgagccactgtgcccagccgtagtgcagtatttttaagcttcggtaaggtagaacccctttagagaaaaaacatcagtgagaagccatgttgccttatttttactataatgtttctttttttttttttttttttttttttttttttttgagacggagtcttgttctgttgcccaggctggagtgcagtggcgtgatctcggctcactgcaagctccgccttccgggttcatgccattctcctgcctcagcctctcaagtagctgggactacaggcacccgccaccacgcccggctaactttttatatttttagtagagacggggtttcaccgtgttagccaggatggtcttgatctcctgacttcgtgatctgcccgtctcggcttcccaaagtgctgggattacaggcgtgagccaccgcgcctgacccaatgtttcttaaaatacatccaaacataaaaagaacaaggatgtttatagctggtatatcaccatagccatcactataacaccgtaacaaacatgcaaatttgttacaaatctaattctcaaatgaataccattcaaattaatagcatgattttaatgtgacaggtgatgctattttattaaaactctatcatctgtgctcaggaagtcatggctgctagggtaagttttcctttcctaaccaattatgtgccagttggtggtaacataacaccgttttcctttgtttcctttattcaaacttctcttgtactatgtactagagcatgaaaacgtctttgacctacagttatgttagctggagacacagcagaactactgttgtcatcttgatcctgaatacaagggccgattgaagccccagaaatcatggggaagtactcgtttacataaagtggtcatgtagataatctaaaatatgcccgttagtgtattaagatcataactgcctaaagcttcctgtgccaggagtggtcttagctctcaaagaagtcatagtctggccaggcgtgatgactcatccctctcatctcagcactttgggaggcgaaaggattgcgtgaggccaggagtttgagaccagcccgggcaacatagcttgatcccgtttcttaaaaaatggaagtgatatccaggtggggaaaccttcctgctgtagtggagcctcttgagatggcacacgtattttgctcacaggtgctatcaatatatagctctggttcttcagaatataaataactatcacctgaccccaataccttatctatattgagattgttcattagatccaaaacatcttgtgcatttcttgctttttagtcatgcacagaccttgtctttactttcaaagacagtttggtactgaaaattgctctggtaaattaacacaatttatttaatccctgctctttccaatctttagcaacgtttttttcattgtcaccatcagatgaccttgctgagcttccaagtggcaattgcttttgttgtattgtttaaaggcaaacaaaaatcaattattattggctctagagtgcctggcgaggtggagctcagttctttgtgcattgcgcactatgctgctggtgtctcagctgccatgcttatggttgcattactttcctgtctagctttggtattcttgcctttaaaaatttctttttccatttgcttttcttagccagtgatgacagtaaaataaggaacgacctatttattgttttaagagatacgctggatggtgcccaggcagatgagcattgccattcaaggtggcttcttggtagactgcatttactcttaatcgggtgcctgtgggtcagtgcatttcttggtcatccttactctgtcaaagctgccttgttagccaggttactagccatactagtctcattaccttacgataacacctcattcaaatggccttaacgaagttgaacacttatcttagtcactatggttggctttgaaccttttctagaagttaagtttattccctgggaaaaaacgtgtttgccaccacacagagtgctgggtgtactgggaacccggcttcaaaggcaactactccagtagggaaggttgaggagggtattgaatgatagctcactgcttaaataagtgtttagagtcccaaggtatatgtaatggcatatgaaatgcctagtgtttaaagaatattcagaaataatcagtcatactctttaatattcatatctcatagagttagcatcaggaaggaaacttggtagattaaataaaatagcagaaattactgctggatttttgtacagtagaaatgtatgcacatttttctcccctagtagtcacttaagttgcatatccatttcctgttacatctcatgacatgttttgggtaaaccgtttttggaagcgtccatttgtgtagaagttaggtggttctgagtttaactttgtacacatttctaggcacaaggaaattaaataactggctgagtgagagtgatctcgttgaatgctgaggcttgtttgggaattgggtttattttggtgaaatgtaaatttagatccactctgtattagtttttttttttttttttttttttaacggagtctctctctttcacccaggctgaagtgcagtggcatgatctcagcttactgccaccatgccaggctaacttttgtatttttagtagagacggggtttcaaccatgttggccaggctggtcttgaacgcctgacctcgtgttccactcaccttggcctcccaaactgctaggattacaagcatgagccatcgcgcccggccaagtccgtttttacactcctataacgacatacatgagactgcgtaatttataaagaaaagaggtttaattggctcacgattctgcaggttgtacaggcttctgcttctggggaggcctcaggaaacttacagtcataagggaaggtgaagaggaagcaagcatgtcttacatggaagaatcaggaggaagaggggtggggtgccacatatttttaaataaccaagcacagactcactatcacgagagcaacactgaggggcaaaatccactcccatcatctcatctccttgtaccaggcccctcctacaacactggggattgcaattccacatgagatttgagttgggacacaaatctaaaccatataaccctcatacacatgtattgtaattcagaatttgtcattttaaaaaaaaatttttaagattagcttatcaatttaaatgtttccagccctgaactctcaaagtcaactttaatgagttttgatttttgccgagaaagatcaacagcagaagaaagagaagtataacaaaacttagctccacaggagcaaactggagaattggagtactggtttatgattttggtcagttaagcagaatgcagtcctagtttaaacaagactggataaaagtccaaattcaaataccattcttacaagtgtttgaatttaattttgtcagtgtacatacatatatctagtaccatagtgatctcaggctttgaagaatgaaaagcaaaagaaatgatttagagtcctggtccaaccactcagctatctgatatccttttgctattttcgtttaaggggttatcagggaatgagctaatttgacattttctgcttaaagcaatggttggggctgggttggggtggagagagctgctctgaggaggtggtgtggggggcctgcgaggacacacttgggttacctggtacatctgcagttcccatggaattgggtctcaaaactgagaaatggaagtgtgagctaggaagaggagtagcttaatggggactttgccacacttttagtgctcctgtagctgcacacatgttgttctttgtaatgtatgatttgtgtcccagtggaacacttgaggagtgggagctggagaaaggaatgttgtacagtgttgtgcagatgtgggtgagatgaggtgatctgggaagctggcagtcttagttggcccaggaatgccaggacctgagatgacagctgctggtggcagcggggaatgcaggtgtatctgtgtcgaggttgggaattggactttgaagggctgggacttccagaaggtaaaatgggattgcactgtttgggagaaggggtacagatttttttgtttgcttttgagataaggtctccctctgtcacccaggctggagtgcagctgtgtgatcatagctcattgcagcctcaacctcctaggctcaagcaatcctccttcctcagcctcctgagtagctgggactacagacatgtgccactacacccagtgaatttttttttcttaaagatgaggtattgctatgttgcccagactgatcttgaactcctagaattctttttttttttttttttgttttgttttgagacggagtctcgctctgttgcccaggctggagtgcagtggcatgatcttggctcattgcaaactccgcctcccaggttcaccccattctcctgcctcagcctcctgagcagctgagactacaggcgcctgccaccacgcctgactaattttttgtatttttagtagagacggggtttcaccatgttagccaggatggtcttgatctcctgaccttgtgatccacctgcctcggcctcccaaagtgctgggattacaggcatgagccaccgctcacagccgaactcctagaattcttaaacattaaggacagaaacatctctgttcttaatcatgatttgcttttagtctcagcagatggaaaaatgatttacttgcaaagtgagagagctagatgaggaaggaaagaatatgattttgtaccactcagagaaaaatgtgagcatttctctactgtcttgggttggttattttccgttgattcaaaattgctctgcaggagacataggagaggcttgagagatgtcagtgggtggccatggctcagccttgatcctgagtgggtgggaatactctgttaatggggcaaagtggaccctccaggtccttcatgctccttttggaaagaagcgttcctggccagacacagtggcttacgcctgtaatcccagcactttgggaggctgaggcaggcagatcatttgaggtcaggagttcaagatcagcctggccaacatggcaaaaccccgtctctactaaaaatataaaaattagctgggtgtgatgatgtgcacctgtagtcccagctacttcagagctgaggcacaagaatcgcttgaacctgggaggtggaggttgcagtgagccaagatcgtacccctgtgctccagcctgtgtgatagagtgagaatctgtctccaaaaaaaaaaaaaaaaaaaaaaataggaaagaaaatatatgttcccctgtggttccctgttataccctcttctcttgaatagtttatcagaagggacaaccagctcctcatgcccttcctcagcaagtgtcaacagtgtgggagtgcagttgataaagcttgattttcacaactctgcaagtagctgagctccaccagtgttagaactgaaattgaggttatctcaccaggaaccaactttcagatgttgaagccagtagaaatttagtaatgtgggaaactgataactaaaagtattccaggttctaattattttgtcagctcagttttaggaagcagtcctagggattcccctggaagaaagtttggctggatagagggcagtgattgtgaattttctagatcttttgtggactgcttctgttgttaaaaaagcagcagtctctcagcacacgaatgggaagtgttaatgctgtaactgagtaacactgatactgagtttaaaataatggtaaatatcccactgaaatttcacccccagtacagattagggccttggaatgctggatagtggattaaggacatctgaaaatctacttcataaaagcagtgagaacattggcaaaacctattaatttcaagtttttcagaaccatggaaattagttaaagatttctagcaatctgaggaatgattgttcaagaaaacactgggatctcagtaggaacagtgaaccttgtgttttaacctgctgcaatcccattcccggcccctgaccacctccttggtggccttgaaaaccagcagcctcacagccatggcagctgtgaaactcagaagtctgttaaaccactggaagggacagaacagaactggagctcttgaaggaccatcctcaaagaaatgtcacaattcgaccatttggcagcttgcttgaaagggcctttctgagggctttgtctttgtttcacccaacacaggtcagctcacattgtgcaaacagctctacctgctgagcatttgttgaaaacaatcggtggtagttgtttaatcacagctgtctgaggtggtgttgctaattgaggccaagtggctgaccaaaaaattttttatttttattttatttatttatttatttatttttttgagacagggtctctctctgtcacctagcctggagtgcagtggtgtaatcgtgactcactgcagcctcaacctcctgaatttaagtgattggtcctcccacctcagcttcccaagtaggtgggaacacagatatgtgccaccatgcccagctaatcttttaattttttttgtagagatggagtctccctatgttacccaggctcaaacagtttttttaaaatggagaagtaaatgttccttgacgacttcaaaaagctccaacatattcctgggaatctagaaggctctgagcattctgagaaggctctaccttctctgctgtggcgatcttgaggctttatgcaagcctcaaggaagactaaggtagaattataaaccattcagcagagtgttgaaggcatgccccaatacccacacccacacgccctctcacctacccacccacccacccttagtaaaggctggaaaatttattaattcaaggcatgtaaggaaatctctgtgtagttactagcgaaccactaaactaagagtcttcagtggccatacatggcaaacaaaaaacaaaacaaacagactttatagaattagttcctgaaaatcactaatcagatagcaacaaaacaaaccctgggatgggggaagaatttgatttttagaattgacacattgtattagataaaatttctagtctttgacaaaaattagaagctatctcaagaaacaggaagatatgtcccatatacaggttaaaaaaacacacacacacacacacctcggtttctgcctagtttctaggatagaaactgtccttgatgaagcgcagatgttgggcatacttaaaacttaagtcactatgaaagttatgttcaaataactataggaaagcatgtctaaagaatcacatgaaaatatgcttgtgaggttgaagccaggaggattgcttgagcccaggagtttgaggctgcagtgagccatggtcatgatcaggccactgtactccagtctgggtgacagagcaagactctgcctcttaaaaaaaatattgggtgaccaaacagagaatgggaataaagaagtagagattataaaaaaaagaaccaatagaaattctggagtcataaactctagtaactgaaatgaagaattcactggaggggcttagcaggtatgaactggcagaagaatcagtgaactggaagacaggtcatttgagatagttcagtctgaacagcaaaaataaaagaatagaaaaatgaacaaagccttagagacctgtgtaacatcatcaaccatacccataatgggagtcccagaagagggaagatgtaaagggaaaaagaaggtatactgtgaatagttgtgtgtttgttctcatgccgctaataaagacatacctgggactgagtaatttataaaggaaagaggtttaattgacttacagttccacatggctggggaggcctcacaatcatggcagaaggcgaatgaggtgcaaagtcatgtcttacatggcaccaggcaagaataggagttgtgccggggaactcccatttataaaaccatcagatctcatgagacttattcagtaccatgagaacagtatgggagaaacttcccttatgattcagttatctccaccttatcctgcccttgacatgtggggattacaattcaaggtgagatttgggtggggacacagagccaaaccatatcaagttgtatgccaacaaattaggtaacctaaatggaatttatacaaattcatgtagatgcaaatggccataactgactaaagaatttgaaaatctgaataggccaataacaggtaaagagattgaaatagcaatcaggaaaccttccaccaaaaaatactgggtcacatggtttactgggtaaattcactgggtgaattctaccgagtattattataaactctttcaaaattttataattaacctgataccaaactaaagacatcacaagaaaactatggaacaatatcccttataaatacagaggccaaaatcctcagtgcaatgctagctttcctcccattctcactacttgtattctgtcataaaaaaaggattgtacaccgtgacaaagtggaatttatcccaggaacaaaaacttggttcaccataccaaaaccactcaatgtaatctgtcatgttaatagaataaaagacaaaaaccacatgatcatctcagtaaatgcaggaaaatcatttgataatattcagtactttttcttgatgaaaactatcaactagtaatagaaggaaaattctacaatttgataaagactgtctatgaaaaactcacagttaacatcatacttcatggtgagaaattgcatgctttctcctaagattatgagtgagacaaggatagtcattctcaccacttctatgtagcattgtactggagattctatctaggacaattagtaaaaataaaatagtaatataaataaaagcattgagattgtaatggagattggaatagaactataactagaaaagtatctgtagttacagttgacatgatcttgtatatagaaaatcctaaggcgcgcgcgcgcgcgcacacacacacacacacacacacacacacacacaaatcttgaactaataattgagtttacaagcttgtacatacaagaacattgaagcatccagaaatgaaattaataaaacaattccatgatacagtagtatcaaaaagaataaaatacttgggaataagtttaataagtttatgatttgtacacaaactataaaacattcttgaaggaaagtaaagaagacctaaaaaacaaaagaaaggacattccatgttcacggattagaagacttacattgttaatacggccaatactccccagattgagctgcagatggagtgcaatacctacaaaatcccagctggcttttttttttctcagaaattaacaagtttattttaaaaatcacatggaaatgtaagggacccagaataaccaaaacaaccttgaaaaagaacaaagctggaagactcacacttctcaatttcaaagctttgctacaaatctacagttatcaagacagtgtggtactactgtgtggacagccatagagatccatggaattgaattgagagtccagaaatagacccttaactttacagtcagttgtgtttttgacaggggtgttaggacatgaatggataaagaagatgtggtatatccatacaatgggatattattcagccattaaaccactaagctcagataaatgcatggatgaaccttgaaaacgtatggtaggtgaaagaagtcagacacaaaaggccacacgtttatttgaaaattctggaataagcaaattcagagacaagaaatagatgagtgttaatatgtgctggaggctggtgggaggggagaatagggtgtgatggtagtgggtatagagtttcctttgggatgatgaaattttctgtgattagctaatggtgatagatgcatagttttggagacacattaaaatcaatgaattatacatttgagaggggcagactttatggtatatgaaatctcaataaaacgtatttaaaaacaatatacagttaagagcgcatccagatacacctaaggtattagtaaagcggtgcattaagctgaaatatctggcttgtgcaaacttggggcatttgtaccttatgtagaattccaaaatctgcttaggattttccctgtccactggactgccactggcagggtctgcttccctgttcctgggttgagggagcagcattggagcatccctcaattcctgaatgaggaagttagttaaaagggcaatgtgagctgtagggccacactcatctaacaggtgagcttaagtttccattgatggcagacctatcagatgtttcctcccattctcactacttgtattctgtcattttgctcttatcctcccaaaatcatgctaagattttttttttttttttaagacagagtctcactctgtcccaggttggagtgcagtgatgccatctcggctcactgcaacctctgcctcccgggttcaagcaattctcctgcctcagcttcctgagtagctgggattacagttgcgtgccaccatgcctggctaattttttgtattttttttttttttttttttaatagagttggggtttcaccatgtgagccaggatagtctccatctcctgaccttgtgatccgctcacctcggcctcccaaagtgctgggattacaggcgtgaggcagtgtgtctggccactaagaatttttaaaataagtgacacaatgaagaacaaggccatagagatgatcttgggtaatttgagggtatcaaaaagtatctgcctgatggatggcttgagacactaaaaatgagtaaatgattacaaagtaaggaatgataatttgttttgaagaataaaacagattcttgtctctggtggttgagggatacgactgatgctgtatattaagacaagaagatgaagcccaaatggcagggaaattgaagagaagatacaggggtatctaggcacagggttggctgtgaaagtttcaatatgtaaaagatgataggctgaaaggaagaggatggtggaaaatacaaaagaggcattgataattcaggagtgtggagtgtgagagaagcttctccataggtgaagagttggatggacagtggttgttaggtcaaaataacaataataataacctagcacatatgtcagatatctgtttgggttcatcttacgcaccattctcttgggagggagcatgctttgaacagatccaatttatgatggagttttaggaccagaaagcgtcgtagtagcagagacttctcgtcctagagagcaaaggggaagtcattttttagttagttagtttgtgttttagacagtcttgctctgtcgccttcgcctcctggatgttcaaacagttctcccgcctcagcctcctgagtagctgggattacaggcgcacaccaccatgcccgactactttttctacttttttagtaaagatggggtttctccatgttgtccaggctggtctcgaactcctgaccttgtgatccaccctcctcagccccacaaagtactgggattacaggcgtgagccaccgcatccagccttagtttgtttctgagatagagttttgctcgtttcatcacccaagctggagtgcagtggtgtgatcatagctcactgcatcctcaaacttgtggggtcaagggatcccctcacttcagcatcccaaaatgctgggattacaggtgtgagccactgcatctagctgggaagtacttttaagagtatttttttcaggctgggtgtggcgcctcatgattgtaatccaagaggtttggaaggctgaggcgggagggtcacttgagaaaaggagttcgagaccagcctgggctaacatagcaagacccccatccctacaaaattttttttttaaattagctggtggtggtggtgtgcactggtagtcccagctactcgggagtgaggcaggaagattgcttgaatccaggaaattgaggctgcagtgaaccatgattgcaccacggcactccagcgtgagtgacagggcgagacccctccagatgatagctggagatcatgttattttcttactgattttcccccggtttagcaatacaaagtgatcgttaggttggcacaaagcacgatggaaaataaccattgttggcatcaagagaaatctcacaccacttgataaatatagtgaactagattactaaagagtgatttccctggattgcttgaaccagggctcagtgaaaatgttgctgtttgctttttttgtggtcaggattttttgattaaatgagaagcctacaaatatgcaagctagaaggtgttgtattttgggattaagccagactgtagcaggatgttagtaatttgagttgcataaactaatctggggaggcagagtgagtagctgatgtcacatgaagagcaaacccttgattccattcgtaatacataatagaacaccttcgtttctaaaactgggtgcagtaaagcataaaaaaacctttagtagctgatgaaagattctgccccaggcttgagtctattaaccagaaaaactgaaacaaaattaggcaaggtggtaagttttgctttcttttagtggaatattaggatatacagcaaatggtagcaggaccacgttgggaaaagggccaaaagactttttaaaaatcctgtttgaggtttggatccattttctttcatttttggacatacctttgagtagtgggtaaactgagagctcagtgaggtgagcctgtgtctttcagcgggcgggcgggctggagttggaactcctgtttcagtggttttcagatcctgctgatctccagaatggctccagttcccccacccctaatgctttattatgaaaaatttcaagcctgcagaaaaggtaaagaatgtacagtgagcacccatataccaaccacatggattctgcaatgaacattttaatatacctgcttttttttttttttttttgagatggagtcttgctgtgtcacccaggctggagtgcagtggtatgatctcagctcactgcaaccactgcctcctggattcaagcaattcttctgcctcagccttctgagtagctgggactacaggtgcgcgccactatacccggctaattttttgtatttttagtagagatggggttttgctaacaggccagtctggtcttgaactcctgacctcaggtaatctgcccgcctcagcctcccaaagtgctgggattacaggcgtgagccaccatacccagcctcataacggctttttttttttttttttttttttttttttttgagacagggtcccactttgtcactcagtttggagtgcagtggtgtgatctctgcagccttgacctcctggactcaagtgatcctctggcctcagcttcctgagtagctggagctacaggcatgtactaccatgcccagctaatttttgtattttttatagagataggcttttgccatgttgcccaggctggcctggaattcctgagttcaagcaatctacccacctcggcctcccaaagtactggaatctctttttttggaatacgtttcaaagcatgtgatagacatcggtacagtacagtcctaaacactgagtgtgcacgtcgttaactacagtttaatatttgttttgtttctggatcttttccagggatttttttcaagattaaattccaagcgccatgatagtttctgagttagaaggatggggcaggcccaggaatcagtactttgaaaagctcccaagtgcttcttgtgatgcatcgggtttgggatcttctgccccagggagcgcttcccgattacttcatagctaatcctcacctaaaatgcagaggtgggcagttatctttaacctgaccatagagctccatttttggttttcttggaatcttttgtttaaaacagtggttctcaaccaggggcagttttgtgcctcgagagacattggacaatgtctgggatggtttggttatcacaccagggggcatctagtgatgagagatcagggatgctgccgagcatcctgtaatgcaccggacagccccacaggatggggagttatctggaccaaaatgccaatagtgctgaggctgagaaacgtatttttttttttttttttgcctaaaagaaaattgcttgctccagatgactccagacaaaccaaaataaaaataaaaagtaaaaactaaaatgacaacatgaaatgaatttttaagagccaaatgagacctttagagacaatctcatcactgcctacctggtttccgtcaaatacagatttatgctccagaaagtacctaatttattaaaataagctgatttctaaaagcttgttagatggtcagtaatctcaaactttgagtgaatttacttgaaaaggtaatgttgctggtggcctttagtttcttttaatatatcttaaatatgatatcaaagaaaaacagaacatgatgctttgggatgaatgtaatgaatgaaaagcaggattctttggcaggtaactgtgtcccaggccctgtcctgcagggtggcagggatgtgctgagctgggtgaggggggaccgctgagggcttctctcagtagttgctctgtgtagaattttctgagtgtcttgggagaatgggggcatttttcctgaaggtctcacttgactccacagtgaatggctttacctgtctcttgagtaagatgcatttctagtaatgctctgactacttagtccacgtttgactagtttttaggaaaacaatatgtacaatggaacagaaagcttacagaaataaagggcagttcttttcttgaggtgaaagtgatgtggggagccagtaggtgacaggatttgctctggcccctccgagggaggaggaagatgaaggtgaaacgtggtattggtcagtccgtttcctgcttggttgatttcagggacctgatgagacaatatggtggtgaaaacagactgctggattgcaatgggcggaactgggcttagtctctggataggtgtcagttcatttcacacctgtcattgagggaaaataatacctgtatggctgttggaagattaaatgagactatgaacgggagctgtgtggataaaatgtaccaggcactcccagtgccagaaggtgttcttgttagttctgggtgtggcgatgtgcgaagacacccgtgtctgcggggtgtgtgtgagctgcagataaccagcaggtcctgctgatgaggcaaccttcttgggagtcttggctcagttccggggtttaattacgatgtatccttgggcaagtggcttaatgtctctgattgtaatttccttcattttttcatatctaaaatgaaagaggtgcttggatattcctaagggttcatctttaggagtctgtacttctggtgtggagctttctggaaaaaggcttctgggaatctgaaatggcagtagtgatgggcgtggtaacagcagtgttcatacgcttcctcagtaattttatgtaacaaacactcacagtgtacttactgcccctgagatcttaaaaactctcactttcaactttcacgacaccctataacttaggtaactgctattatccctggtatacagatggggaaactgagcctcagagaggttggtgatttgccccaagtcatagctgggaagtggcagacctcgatgggatgcaggcaccctgccctctgggctccgatcacttggccacctccccgcatgcaccacatgggctgtggagttggaggcatttgtgggcttcaagaatgagagttggtggggagtatgtgtgaggaaccggaggggtcatttccctgggactgggattgtggaggttttgattttgcttttccctttttaaactgggtgaggtatgagcatgggaactctgtacggaatgtgtcattggagagggacagcagggacaatgaaggtagtccccagagaagtatgagaaactggcattcagtgctcatgcagaattctctttgttttaataataatacaaataataacattaatattatttttagaggcagagcctcactctgttgcccaggctggggggcagtggcacgatcatggctcactgtagccttgaactcctgggctcgagccatcctctcacctccctcagcctcctgagtagttgccatgcgtaacaccgtgccttgctaagttttaaattttttgtagagaccgggtctcactgtcttgcccaggctggtctcgaactcctggcctcaagcagtcctccaccacagcctcccagagtgctgggattaaaggtgtgagccactgcaccctgcctaggattctctgtagatggggagcccacctgggtgagatgccagacacctggctccggcatatgcacagcagtttcacacgagcgtctcttactcaggtttcagagttctggtaaaagatttaggtttgacatccaccctttgaggtttttggttctcacatgtttgataacctgaagcttgtgggtttgatatgggcagtaaagtgggattatttctgttagagatccttattccctagagactttctggtctggaaaggtgagaggctatatattcattagctggaaccaccatgtggatcatttgttggaagaactgttaggaagaagacagatattgctatagagagcagggccagatgagcgagaaggcaaatgtacttcattcctgtacctgcaggcttattagggacagatgccctcaggcggggatgtgtagcttcacttgactgctctaaataaggagcgagagggtggtgtgtgtgttaaccatcaagattaagcaagcaagaaaaagacaaaagaaagccatcatttagtaactggtggagtgagttggagcctgggagctgccccaggacaactgttatttcccttgatcttcctcaaaccctaccaggaagtgagggcaacagttccctaaagcagccccatcaagctcttaagaaagcagtttcactgggagtggggagaggtagaattgggaggtggtagagggctggggggtatgaaatgtgagggccggagtcctcagcatcggaactccagaaataaaaagttgtctgggtctttgaaagcctcctatatgataatgttacagtaacagtgttctctgctactttcaatgaataaaaaacctagggtttctcagctacagtgtgcattaagagacatttgtggtctagttttggcacttcatttctatttgggaacatgcattctgagttttagacaactagcttccaaatgaaattttggaacaccaccctttttttttttttttttttttgagatggagtcacgctctgtcgtctgggctggagtgcagtggcgcgatctcggctcactgcaagctctgcctcctgggttcacgccatgctcctgcctcagcctcccgtgtagctgggactacaggtgcctaccaccgcgcccggctaattttttatatttttagtagagacggggtttcaccgtgttagccaggaaggtctcgatctcctgacctcctgatccacccgccttggcctcccaaagtgctacgattacaggtgtgagccaccgcacccagctggaacaccacccattttttaaagcagagaatttattgttatttgcacaaaaggacgtttgaacactttaggaaatctggatgctggaattaactcggtcaaaacaaagcaaaacacacagaatctcgtatcttttcctgccctgatgctgaactgcagccttgatttatgttttgtttttccacttttgtttctgaacctatgtggtacaggctgaacccttgtccctgcttcggagcacttaccttaattattatagaaaaaaattaagagttggctgactctgtgctgaactttctggtttttttccaggcagtttctccataacaaatgcgttttgcatagaattgaaattgcctatttacctcaatgacaccatcctaatagttggtggtaactacctaatctaataatctctcattgtgtgtgatagggctatttattgtattttagagtgaaataatgcattttgtttgcattttaaaaaggaatggtacaggaaatgattgtaatccaggactaaatatacagtttgcagtctttttattctaattgctttctgatgaatatatatatatatatatatatatttttttttttttttttttcttgagatggagtcttgctcttgtcgcccagactggagtgcaatggcatgatctcagctcacttcaacccctgcctcccgggttcaagcaattctcctgcctcagcctcccaagtagctgggattacaggagcctgccacaacgcccggctaatttttgtatttttagtagagacggggtttcaccatgttggccaggctgggctcgaacttctgacctcgtgatccacccgcctctgcctcccaaagtgctgggattacaggccttctaataaatattattttacacatcgagatagtactgtttatgcattttgtatgctgcctcttaaatctataagcattttcttttcttaaaaaaaagctttgggctgggtgcattggctcatgcctgtaatcccagcactttggggggctgaggcaggtggatcacctgcggtcaggagttcaagaccagcccggccaacatggtgaaaccccgtctctgctaagaacacaaaaattagtcgggcatggtggtgcatacatgtagtcccatctacttgagcgtctgaggcaggagaattgcttgaacctgggaagcggaggttgcagtgagtggaggttgcagtgagctgagatcacaccactgcactctggcctgggtgacaagagcaagactccatctcaaaaaaaaaaaaaaaaagctttgataaatattgtacatgattgcaaagcgtcccatcgtgtggatgttcacttagttatttgatacatatttttgtgttcttgggctgtttctaatatttctgtattacaaataaggtgatgggaagcagtttcattcatcaatcattctttttaaatgtcccttcctatcagtttctgttaatcagtcaaaagcgtatacattcttagcaggaacttaaattcttagtaggaatcttaacaggttaagatttctaagggtagagagggtacctgttttgttaaccggtggcttaataccatttaataccagtaaaggctcaataaatgtttattgactgaatgaacagaaaagatcagtgatcatgaagaatggcccagttagtggtatatatacgagaagtgctgcagtggttcacagtaacatgataataactaattgtgtaatgatttggcacgaggtactgatctaaatgatttatacattgttgcatgggattttggaaggggagggagtatacctctaaattagttcatgctatgggatggaagtaagactttaaatttaggtgggctcaaaaaacagaaacaaaccaggggccgggtgcggtggctcacgcctgtaatcccagcactttgggagtctgaagcgggtggatcacgaggtcaggagatcgagaccatcctggctaacacagtgaaaccctgtctctactaaaaatacaaaaaaattagccgggcgtggtggcgggtgcctgtagttccagctactcaggaggctgaggcaggagaatggcatgaactcgggaggcagagcttgcagtcagcagaggttgcaccactgcactccagcctgggcgacagagcgagactccatctcaaaaaacaaaaaaaacaaaacaacaacaacagaaaaaaatcaaatgttcgtcagctgatgagtggataaacaaaatgtggtatatccatacaatgaatgctatgctatgctgccataaaatggagtgaaacattcatacatgttgcaatatggatgaacctgccactcaagtagctggtactacaggcatgttccaccatgcctggctaatttttgtattcttagtagagacagggtttcaccatgttggccggcctggtcttgaactcctgacctcaggtgatccacctgcctcagcccctcaaagtgctgggattacaggcgtgagccagtgcgcccggcccaaagcttttttttaagaaaagaaaatgcttatagatttaagaggcagcatacaaaatgcataaacctggaaaacattatgggaactgaacgaatccaggcacaaaagaccacatattgtgtgattccacatattccacatattgtgtgattatatggaatgtttggaacaggcaaatccacagagacggaaagtagattagtggtggcatagggctggaagaggaaggaaacaaggactaactgctaatgggtacaggattttttttcctcaagtgatgaaatattcttagattatgaggatgcttgtacgactctgtggatatactcaaaacgatttaattgtatactctaaatgggtaaattgtgtataaattatgtctaaataaaaccatgaaaaattggatgaggtttagcattgtagaaggaaagatgggggtggtggtgtgttagtttttgagggctgccatagcaaaacaccacacactgggtggcttaaacagtaaccatttattttctcacagttctggaggctagaagtccaaaatcaagatgtcagcaggtttggttttccctgaagcctctctccttggcttgcagatggccacctggccaccttctcactatatcttgtggggtttttgtgtgtgtgtgtgtgtgtgtgtgtgtgtgtgtgtgtgtttgagacagggtcttcctctgtcacctaggctggaatgcagtggtatgatcatggctcattgcagcctcaacttcctgggctcaagagatcctcccaccccagcctccagagtagctgggactacaggtgtgtgccgcaatgcccagctaagtttcgtaattttggtagagactgggtcttcctatgttgcccagcctggtcttgaattcctgggctcaagtgatcctcccacctcagccccccaacatgctaggattgcaggtgtgagccactgcgcccagcctggtcttgtctttgggcacaaatatccgctagtgtctcattgcgtgtccacatttcctcatcagctctactggattagagcccagcgtaatggcctcattttaacttaatcacttctttaaagtcccagtctccaaatacagtcccattctgaggtagtgaaggttaaggctccaatgtgaattctgggggaacatggttcaacccaatgagaacaatggttatctgttgggagtgaggactgatatgagtggagatgcatcggtaaagatgcgcggaccacagatgtgacgcagcaggtgtgcacagaggtatgggatggggtcagtgtggagggccgtgtgccaggcagcagtgtggacttggtcctctacccagcgtaggggggtcattctgggggctgaaccgagggtgacactgtaaaaccatgcttcaggaaaattcatctctgcgccctggaggatggactgaggagggaagaggctgagggaaatgagtgtgcaagataatgaggcgatcccaagggaagtaaaaggattggaggccttgcaaaagcaaagcgaacccaagcttcagaacggaggcatctgagatgatgtcacagttttgaaccttatttatagaagaaagagggtgaaatggggaattaggtaaatgaaaatataggtcccattgttggtaagatacatggagtgtcattgattcagtatttagtgtgcttttccttattttaaacagctttcatagctcacttccaaactgtatttttgcaaccaactctttttctctctctattaaaaggagaatcttttattttacactaattaacagctgattctcctaagagagttttcaggaacctaaacctcagagttagatggagacaagtgtctttgttaatcatttatgtgaggtcagattgtacaatttgtaacagattttacagctggttcctttattaagggatgggtaggattcctactaattattattttgagttttactttgtttttaaccattgaaacttgggggatgtactctttggtttgggtagattttgcttatagatattgaagtttgagttgttgaatttcatacatattttattttgacttttaatcctttaaaacatttgactctgactccattgagctctgtagaacatctgtcatccagatcttttgccagaatatagagccttgattggacaccttgccagctaatttaaagcttcccaagatgcagaatactgtgtaaaatgtcctacctgttgtgtcagaagggagaaaataagacgagattttcatatttgcttgtagatccataagaaacttgggaagaattcctaagaaactagcagtagtggttccctgcagggtgggggctctggatgtgggtgtggcaggggatgggagagactggcaggttgaggagcagggtgagagggatgtttttatgatgtacattctcatatatttattttgaactatttgaatgtattactcatgtaggaagacaaacctttactttccaaaaatattagggaaaaactttcaagtctctcatttttagcctttttgttgttctgatatttccacacaggacagacggtaacatgcccgatacattttaagtacaaacaaggctgtaagttgccttacttgactttcttcactattttctattcaaaaaagtatttttgaatccaagggaattagaggaataatcttgaaatgattatgttttgggggaaaagtatattattaatatgatagttatctaatgttgtgtaacaaattgcctccaaatttagcatatgaaaacaataagcattcattgtgtcacacattcattctttcttttcagtgaaagttaacctgtttccatctgaatagatttctcactctgtatcctgccagtaatcattttgtactgtttctgtgcctttcaatccaagagtccaacctgatgaggttctgctggtgtaattcttttaaaagcattgtggatgtcctgtgaatctcactggagttcactttttaaacattagacttctgtggagactgctgaaggacaacacccttacttcttagggcctttggtttgccagaattgttctctgagccattgccttggattttttcctgacttcttaacaaaggattttataggtgggaccttcaacactctggaaattgccttagctacattcagccatctccttaggtacattttccatctcccacattgtagcaggcaatggcgttgctaaactttccatcaggaaataacaaagatctccttttccagtttccagtaacattttcctctctacaccatcatccacagtctcctgaaaggccctccaggttctagcttttccagggctcttcaggggttttcgaactctctttttacagtctttccagttcctgcccattgccacgttccaaagtcactcacacattttaggaatttttctttttttctttttagcaagcataccaattccagttaccagaatctgttagtttttgttatgtgttgccgcagtacagattgcctcaaagcttagtggctgaaaacaaggaacattactggccaggcacagtggctcatgcctgtaatcccagcactttgagaggccgaggcgggcggatcacctgaggttgggagtttgagaccatcctgaccaacatggagaaaccccatctctactaaaaatacaaaattagctgggtgtggtggtgcatgcctgtaatcccagctactcgggaggctgaggcaggagaatctcttgaacctgggaggcggaggttacggtgagctgagatcgcaccattgcactccagcctggacagcaagagtgaaactccatctcaaaacaaacaaaccaaacaaaaatgaacatttactgccatacacacttcctgggggtcagggatcccagagtgtctccgctgtgtcagtatgtctcagggtttcctgaggctgcagtcattatgcccgctagggcttgggtgggactgaagcacctgcttccaagttgcctcactcacatacctggcaagttggtgccgttgctggcaggaagcctgcttttcttgccaggtggacttctctgaggggtgcgtgaatgccttcactacagggcagctgacttccctcaggacacatgattcaggagaccaggggaaagctgcagtgtcattttatcacataatcccagaagtaacactctgtcatttctgcaatatcctgtgggttacacgtcagcattattcattgtgagaggtgactacatgagggtgagtccaggaggcaagaattattgggggctatcatggaggtttgataacataattggtaagaaattcagatacacctcagacttgattgtggcataccagtgtgttgtaaaacttgtgagaatggcttgccttagaaagacaagtagtccatccagtgtcttattcttatgttaagttgggattgctattttgttacccttgggcctctatatacaaagcctctcatagtaatagatctaattgggttgaagtttagtattatgtatatgccctctgcttttattagtagattttactttcgtgaaaggaacatataaacttcattattgcatttttgtataaatgcagctggggacatggttttattacccaatgtccattttgtaaatatttagagaactttttttttgcatcataaatcagtataaatagaagcttggtttccattgttgccctggctatgaggaagctgagagtgaaatttgtcgttcaagtgtggcagttatgttactgactggcgtatttatattctcctttatttgatattttgctatgagatgttccagtttacttgtgggaaaaaaagccaggtgttcttgaactcaacaaatatttattgaattccacttgctggccagacagcattccatgtgccccagatatggcactggacagatagataaggtccccactcgcctacagcttccaacctggtcgtaagaaaataccttagcttttgctccataatgtggaagaattggcctcagagaaaacctaattcatatgtaccacgtttctacccattcaagttttatttcataatttttttttttttttttttttttttgagatggagtcttgctctgtcacccaggctggagtacagtggcacaatctcagttcagtgcaacctttgcctcctgggttcaagcgattctcctgcctcagcctcccgagtaggtgggattacaggtgcatgccaccatgcctgactaatcttttgtatttttagtagagatgggctttcaccatattggccagcctggtcttgaactcctgacctcaggtgatccacctgcctcagacttccaaagagctgggattacaggcgtgaaccacgatgcctggccgtatttcataattctatctttccatagaaagaattggctggggcacgtataactaatgtgagttactgatttcagaggaagcttttggaagtggttgataggcactgaatgggatggggtggtgagtggtttaaaataacacttgaacctttggattcaaatggttttaaatgcatctcagaaaagtgaaaggtgaatgggagagctacatccattgagagcaagggttcatcagctagggctgtggcttaaactaagcagatattctttcctggcagttctacaggccagaagcctaagatcaaggcgtcatgagggttggtttctctgaggctcccagacagtcatcttctccctgtgtcttcacggggtctttattctgtgtctgtgtccaaacttccttttccttttttttttttttttgagacagagtcttactctgtttcccaggctggagtgcagtggcactatctcagctcactgcaacctccatctcccaagctcaagtgactctcctgcctcagcctcctgagtagctgggattacaggtatgtgccaccacgcccggctaatttttgtaattttagtagagacggggtttcaccatgttggtcaggctggtctcgaactcctgacctcgtgatctgctcacctcgtcctcccaaagtgctgggattaccggcataagccaccatgcccagcccaaacttccttttcttagagggtgggctttatctgtggttcttagttagcctcaccttcattcttccttttggtgttacggtcttgcttactgctttgggaatggatttgttgaaactacatgtgactagtttagggacccagtaggaggttttactataagtgtaaattaacatgtgcctttgggggaccttaaaagtttttgtcattgggccatgagatctgagtgcagctggtagaacctccttgttttctttggtatgagaactcctgggcttttgttggttccttccgttttctccggtgtattaccatttcacatcacagtgatattatccagataacacccatgatttgtttttaacggagtttcactctgttgcccaggctggaatgcagcggtgcgatcttggctcactgcaaccttcacctcctggttcaagcgattctcctgcctcagcctcccaaatagctgggactgcaggtgtgcaccaccacgcctggctaatttttgtatttttagtagaggcggggattcgccatgttggccagactggacttgaattcctgacctcaattgatccacccaccttggcctcccaaagtgctgggattacaggcacgagccaatgcacctggccacacctgtgatttattttatttcatttgagatttcagactttgtcgcttgttctttctgtagaagttttttcatagaagtatgttgtttcaaaagcaaccttcaaatagtagacttagcttggatgagaatctaaaagtctttgagtccaacaaccaagcaggtcccctgtccaggaagtaccttatagctgatgtttgagtatccctgcagatgggaactcactacctcctgaagcaccttacttctacccttggaatagtaacagagattaaaatgtccttccttaatttgaggtgaaatctgccttcttgtccattttacacacactaaccttccttccaccatgcaagctgagagagagccaggttgagcctgtgtttccacaacaactcttctcagacctcctgctgccacctaccatgcacttgctcttcactggctaggttccagttgctctgtacctttcctaaagtgtggtgaccagaatttggcacagtgagggaaggttccagagccctttagtgttatcgggggcacagagcttgggctttggagtcgctcagatcttgagttgatatgcacttctttgtccttgagcaaatgattgaaccttcttggactctcagttcctcattaataaaatgaagatgaaacaagatgagatggactgtgcacatttcctgatgggggctggtatgtgctggtgcccagtgcaaagtggctgctggcagaatggtgagtcaccagtacctgctcccttcactgagtgcttcctgtgtgcctggcaccattgctcagggctttacatggacttactcatttcattttcactgcagcctagagcgtaagtaagtatttgctttatccccatcttatagatgaggcatttgattctcaaaaaggtttcatagcttgcccatgttctagcagctagtaaaaggagaagccagagttttcatttaggtgggagtcctcaacctgctttcttaactgctgtgatctgcactgtggcatgagagtttgtcttaatgtaaatgcacatgtaatagcattattcacattgcctgagactgtggaagctcctttggcaaccagatgccacaggggactcatttcatgcttttagaagacttgagccactacatgccctgggaactgtgttgcttccccactggccatcactcttgcttttgtaagggatgtcacattgagccattaagtgtcatctctggaactcatgactctgttattccacatattaggttttctttgtagctttgtgtcaactccaagccaggtaaataaatcttggaagaaccaagttacagatgtgagtaaaagaggggatggcagggggcagaagtcagggcaggccctgtgacttgccaccagcatcctcccttcgggggaggtcctttcatctgggtgctagctggaggaattggcaacgtcggagataaaggtgtagatgcaccagctgaacgtcttgctctgtttcccattttacgtataagatgggtgatggcatgctgcattcagatccccatgggtgtatttgggatttggggtgggggattgtgtgtagaaggcaggaaagattgcccagcaactctcatttgaattgagggtggaagcggttctcgggcacagtatgccaaggcccagggcgtccaagggacagagcagagatcacagatgctgaacgggtggggaaggagcactaggcagggcatttctgatgagactttgatttgggaggtacgaaagttgtatgaggaatcttgataaactgcttagagtgaatggagatgagtaggaatcaccaccattcacatactggctctgcaagccactcagcacagctctgcacctgctcttatggaggagaagacaagcagaagagaatgttctgatctagaagagttcgtgtaagagcatgaaggcaacagcacttgagatgtggtgcacatgagcaaaatttcagtttatgtggaatttaagattaacagattaaaaggtaaaattctctccctggtaccaaaaaaaaaaaaaaaatccatgtactccctctctctcttttttttttgtttttttttttggagatggagtctcgctctgtcccccaggctggagtgcagtggcatgatctcggctcactgcaagctccgcctcccaagttcacgccattctcctgcctcagccttccgagtagctgggactacaggtgcccgccaccacacctggctaatttttttttgtatttttagtagggacggagtattccctctcttgactgatgtttcagcagtatgtggacagattcttttttaaggtaaatgaccaggggcttgtaatatgagtgtcacttaggcaacaggacatttcaatgaaatggtgatggaaataggttctttttgtagattgtgagctcttgggagcatggattttgctaaatatactgatttttaaatttttttgacatctagcatggtgcatttcacataggagtttttcaagaagtactcatttcacaggcatcttgaatgatagatgtttggtaagaactgcgcaagacagtgtactaatcactcattctcattcagcctctcaagctatcatggttggttagtaataacatttcaaaattatatttgtcccttaggctagcagagaatactgtttaacaggtttttcttgaaaagtaggagtagcgagctagagttgtctctaggtggggtaaataaaacatctcccaccccacccaaattgaagctgaataccttcaattcactactgtgcgcatattcatgtttcatgctgagcagttcacttgagactttctcacggaaagaagtgcgatacagttggtggtagtcttatatttgctacgtgctcatgtgttgtctgatgatagaatgcagtggtcaaatattgcacaatttacgccagaggaggagaattcccatcaactctccaaccatcataaatactttattccacacaataaggaaattgaacttttcagaagaatgatatagaacatctaaaataggttaaacttggaggaattatactgtccattgtaaaattggagccactcttgaaaaattgctgcatgccccactgaatgctagagcaagacatgcagtcccagctccaggggcttccagagtgattgaggcagggctgtgggctgctttcctgaagcctgactcctttctttcctcattacactgccacagatggtggcagatacagcatggattggcataagtcactctctactacctgcagaataaaggcccaatttcctagtgcagcttgcaaagtccttctcatctgccaccttcctgcctttgtgatttctcctcctgggactcctgcacccccttttttttttttaatttttcttttcttttttttgagatagggtctccatctgttgcccaggctggagtgtggtggcgcgatcatagcttattgcaggcttgacctcctgggctcatatgatcctcttgccacagcctcccagatagctgggaccacaggcacatgccaccccgcctggctaattttttgtatttttttatagagacgggatttctccatgttgcccaggctggtctcgagctcccgggctcaagcgatctgcccgcctcagcctcctacagtgttgggattacagacgtgagccactgcacccagccactcctgcacccttaccttttcgccgccctggccggctggacgactgcacccatttcacccggcattcttgtgcctgactgtgctctggccatttcctgtgtctggaatacccccattctcccatgctcagccccgtggactgtgtttattcgtaatcacacctcagagcccttccccttctccatggactccacccctgctgtgtagatggccccaacatcattttgctgagtggagtgccactgcaaggcatggcatggaggagcctgactgcataggtggcggcaccttgagggccttacagacctggcagttgaaggtatgggctagaagacagatgattccaaattacggctaagaaataggtaggctgtaaggcttgattgccgtgaatgcctctagaaagagcacttaaaaaaaaaaaaaaaaaagaagggatttccctgttcatggcctatgagtttaaaaacaagcaccccatgtcattagccctttgctcaccacagagttgctgacacattagacgatctagatatgtgtctgagattttggatgcctattgattgtgtattcacttagactttggtgcttttctagatgtttcacaagttaagatgttgttaagaggttctcattgttttattcctatgttctttccttccactcccaactcactccgatgtcactcatctgggttcttctgctcctgcctgggctgcttagtatttattgagctacacactgtgcttggcacccagggccatggaggcaggcaaagaggggggacatttattcagcagcttcttactgagggtatgggtgccaggtgctcgctctgggaaggtgcaaatgaaatggatgatggctgagcctgaagaattcccagggtgaacagatggggggaagccagttcgggcagagggagtggcaaaagctgctgcttaaagtcgttgctcccaccgcgtggggagtaattggatctgtctgcagcactgaggcctggacaggaagatgggactggaatgcagaggggccttgcagggctcagtcggggccaaagggcagagaggcagggcacagagagaagctgtggccgccttggttggtcccatggaatcctcgcccattggggccatgggcattgatcgacactgtggagcttgaaatctcaccaggtggaaacatctctgccagccctgtaatcatttccatagtttcttctggttcttttcatgaacattttccaatatttttatttgagcattaataaaaggtttgcctatatacttaaatttctgccagaaagctttgacttccgtgatctagagcaagcttgtgcaaccacaagcaggtcacatgcagcccaagatggccttgaatgtgacccaacacaaattcgtaagcattcttaaaacattatgagccttttgtgtgatttttttttttttaaactcatcagctgtcattggtgttagtgtattttatgtgtggcccaagacaattcttcttcttccagtgtggcccagggaagccaaaagattggacacccctgatttagagttttaggacttaggttttgggaatgccaaatgtttacatggaaaggctcatccattaggatgagcatggttttcctcatgaactccttggtagaacctaatgttagtgtgtggctcttttcctttattattttcttctgtacagggtactttataaccaatagctgtttctgaaaatatgggaaaactatttttgaatattgaatcaattacattttcagggtagtttgataaaaggcattctgtggtcatctttatctaaaacgaatcctcctggccttagtgtgattattttattttatttattttattttattttattttattttattttattttattttattttattttattttattttattttatttatttgacagagtcttgctctgtcacccaggctggagcgcagtggcgcagtcttggctcgctgcaacctgcacctcccagattcaagcaattctcctgcctcagcctcccgagtagctgggattacaggcatgcaccacaatgcctggctaatttttgtatttttagtagagatggggttttgccatgttggccaggctgatcttgaccttagatgatccacccaccttagcctcccaaagtgctgggattacaggcatgagccaccccacctggccttagtgtgattttgtattttatgttgtgagttttgtttttaaaaaagaacatcagtaagttcagaaaccaactccatgcttatttgctgtaatgaatttttcccttacattggaaaaacacagttccatctgtcctgaaggcccataagtcacagaatgcggtgtgttggaatgtgaaatcctttcagccttgcagaatctttatcattgtgctaaattgccatgtggaagaatggcaggtggcagttagaacttagggctttctatttattctctttctattttgcattagtcagttaaggttctgatcttcagaactttgtatgaaagtcagtgcttcatacaatttcacatcaaactgtggcattgcaagaggcaaaccatttggaattcttccttaaattacaaaaagaaaaaaaaaagtgaatgcacgaagattgttttgttcgcaagacttatgacacagccctccagctctgtggcttttcattctgatgggaaggaaatgagaccattgtaaatgactgttcagaatattagtgccagctccatgccaagtgctgttaagaacatggagagagcattcgagtgtttgcctctgaatttttgcccaggccatagttcgcagttggccggcaggctgcaagggccattccaagtgggagaagcattccatccctgggacaagtaaacagaacctaaaacaaacacatgtttagttgaagtgatacagcaccaggcaaagtgttctacttttaatgagtgaaggacatcagaaacaaaggatcagagccccccacgttgcattctcaactaattatagcactaaggcaggaatccttggccctttatctggagtgagtcagagagtatatcatgccttatctaaagtctaaagttaattgagcccaaggcccttctgaatagacacacactgtaatcagatatacagatggagtgggaagaggtaaatggtttcagatgccagcctggtgtagttgcatgccggaggggacttaaaggaaacagtgagaagtattagaaaactgtagttgaccaggtatggtggcttatgcttataatcccagcactttgggagactgaggctggaggatcgcttgaacccaggagttcaagaccagcctggacaacatagctagaccccatctctacaaaaaataaaaaattagctggatgtggtagtgaacctatagtcccagcaacttgggaggcggatgtgggaggatcgcttgagcctgggaggtcaaggctacagtgagccatgatcacgccattgcactgcagcctgcgcgacagagtgagattctgtctcaaaatagcaacaaaaacaaaaaccaaaagtatagttgcagagaatggctttccctgcttagttttatccagatgactgttagaatagtggtgaagaatctgacaagtggcagaatgcagggccatgggaagggggagagttcatgcctaaggtcagctgagcagaggagacttggagaactgagaggggatccctctcctgtgtttgttgggagggacagagcctgttgcccagcctgcaggtgtgggagggaccctgcaagaagtccctttggtcaccctcttcaggccccacattgcctgatgaggttcagactcctaggcctatgaagggtaataaggcccgtctgttcctgcctttacttttcttctatcagtttctaagcactctcagcctccgggcctttgatcgtggagcgccatgatacagtggcgttgtcctgagtggttagaggtgtgaattctcgaggccgactgcctgggtttgaatccttgcttggccatcttccagctgtgtgaccactctatgcctcagtttcctcatccgtatgataggaatagtggcagtacctatttcatggtgttattgagctgtacagttgctagctgctgccatcatcattgtcatttcctcatttcttttagacccaaactctcacactttccggaattatttctggagccccccagaaggaattggtctcttttattctagattccctaagaggcacagagggatactagggtgagaagatagtggtggctcacagtcatcactctgtacttactagttttgaaaatgtatcaaattgctgacgtctctgagcaccagtttcccaatgtgttaaagaaggatggtgatacccaacccatgtcacagggtttcgtcagtaaatgctaaaccatgtggtaagcagatgttctcagtgagcaccaggtcactattattatgttacttgtcatgacgagttttacttgccaccttgtattatagttgtgatgactatcttttttctagcctcactgggacacatgaaattatagagttaaatgaactcatttgtagatacttgaaaattgtaataatctttgaatatctgtacctgtttgtgtccagattcttctggttattttgacttccttataccccagtgtccttttttttttggagacaagtttttttctcttgcacaggctgaagtgcagtggtgccgtcgtagctcactgcaaccctgaagtcctgggctcaagcaaatcccagtgccttataagcaggcttcctcaaggcctgttgtcttactcatctgtattttccttatagcatctaggtcagtgccttgcttataatgggcatttggcaaatgtttgttgaatgcatttatcattacttagtaataaatactaaactattttttaatgggaaaataggcaggtttgggttctcatgcacatgacccacatttgtcgaatgtctgctgtgtaccagccagcagctttcttcctttagtgctatttcctgttagagtgggatagtggtatttcagtccacctgatgaccatttaggccaatcacatgttaatgggaattgaatgcatgcattaaacacaacaccagcgggtgctgtccacattaaaaccaggaggtctgcttcattggttcttgactatattgaaagagttggaaatctgacctgggcatttgaggtagactctaaggggtgtaagacggccctttgttttagagacttaggattggtgtgagtgactggcagggactgctttagtgcccagacctttagtagcacacacacaatataggaaaactcttcaaggaaaaccagccccaaataagagagtaggtaatgttctgcttctcttgctttatattctgcttgctttacagaataatctgagatagctaataatcaaagttcaggcccccaaaatgaaagtgatcatcatagaaccagaaaagaagggataaaatactgatttcaaggactcctgaagccaatggcagctctgagtttcctggcagccaagacaaagacagaagcatgctgggatgatgcatcctcgggctcggtaaaggaagtacaggacctgcctgctgctgtgggctcagggaaatgagtactattttccctgtctggagtggggaggagcacttgtctgtggtagggtgaggaggaccacttccttgggctatcagtcattaaggccccttaacatcatggccgattctgaaattacctctgaaagttgagatttatgttagactgtagctctcaagccagttcccttagaggccagagtaatgacagtgtaatttacttgccacctgcttgagagagacaattggtggttaagggactttcccaaggtgataaattgttttagcaaacagatccagaggacagctcctttcccctggtctatgtatgccttttgaacgccaagaccttatcctaaactcaagtttcacgaataggattaaaatactctttggggacctttcttacattgagaacagaggctgggccacagcttggctaaagcattccagatctctcttctgagcaagagattttgacttgttcataaaccaggctctctctcatagtgggcaaggccttaaaaacaaacaaacctgcaaaacctgaggaaacatcttcctcctacgtacttagctgatgtaggcattaatggaaatggatattggagtgggaggctccttttagggggcagaaaagaaagaacgtttttatttttaattaaaaaaatattttcttttgagacagggtcttgctctgccatccaggctggagtgcagtggtgcgaatatggctcactgcagccttgacctccttgctcaagtgaccctctagccttggcctcccgagtagctgggatgacaggcgcacaccaccatgtctggctaatttttgtattttttgtagagatgaggtctcactggcttgcccaggctggtttcaaggtcctgggctcaagggatcctccctcctttgccttccaaagtgctgggattataggtgtgagccaccgtgcctggatgaaaaagaaataacttgattatgggttatggaagtttagcaatggcttcaaaaaatgtcagcagggaatggatgtctttttctttcggatgaaatttcagtattcatctgatacagccaaccaggagaaggaaaactactaagtagaaagacttagataagtggagtcgaacatctctgggcttaaaaggagcatcactcctggcatattcagcgtggcccagctgtgtttctctgagggcgatgtcctcctcagggtctgtgaatggctgaactcagaacaaggcttttgcaatctgcgccttctgaatacagtttttgttctgttggtttaatttgcatttggtgtctggagtgcctggtcatggaaagagcccgttctttgttttgggtaatgagggctgaggtttccaataagtatttctcggttccgtccgtgtcgagtgtcatttgagtagcaagtgactgttgctcattgcactgggcctgcgagcctccatttgcacattagatttttgcataccctgcaattagtaaattacagaatgacatcatgaaatagaaaactgtattcccagatggaaatgctttccgtattctatgcatttttattcaaaggcagatgcatttgtaaacctctttggatggttgttctgcccttgtcagttacttcatagcaaatgtcaactgtaaaccaagagagagaatgagccaggatggagaacttttttttgtttaattgtgtcatgttgggtgctttttggaaagtgggtgaattattcatgatgacatgaatgggggtattattttaaattagtatagaagcaaatggttcacaacccatttattaagaccctaatgttgatgtggctaccaagaagctttaccagcaagggccagtgtgttgccttccttggttggttagtttttctacatccacttaactcctagcctaattttatcttttttttcctctgtttttctttccctgaatgtttttttaagctctgataaatcattttgaattaaggtcgggtatgtatttcctttcttctcatcttcttccccctccatgactgcctgcatttgaatacatttccattgtgtgagaggcagtaatggtacagaggggtggggggtggtgactgcttggtgagctgtggctcacatgtctccagagacacagggcctaggaagactgattaaaaatcaacttttaactactataacggctcactttcctgaaacttgttatgctgtaaccccacctattgaagacataatcagaaccagaaagtgaacaaaattgaccctggaaatatgtggcaaaaattctgtgcaataagtatgataacacttttctttcagtgaattctctctcagggcccactcacagaaccaattttgacatcaaattttcttccttttaaaaatacagttaacccccacccccatctgcaggttctccctctgcagattcaaccaactgcagattgaagatattcagaaatttagaaaaatgaaaaataacaatataacaaaaagtaatgcaaataacgcagtatcacatctatttatgtagcacttgtgttgtattaggtattatatgtaatctagagatgatttaaagtatatgagagggtgtgtgtaggttatatgcaaatcctataccattttatgtcagagacttgaggatctgtgaattttagtatcctcaggtgtcctggaactactccaccatcaatgctgagggacaactgtatataatataaaataaataaaatatgtactgtaaaattgtaatcttgaaagtttgatcctgtggcagctgctattttcaggcagctcagcctttgtttgcatgctcaaaaccagcttgtgatttggtttctaagatcacggctggcttattatctgtgctggcttatcatgacagtggctcggtgttatggacacagtgagcatttggtgtcgatactcccagaatgaactgagtagaatggacaggagactgacctttgtctatttgtctatgtagcagtaatgccactaacttgttgcagtgctctttatcctcaaactatttgctatatatagtaatgcttaaattacatatattatatatattacatatacatattatatatgtggatatattatatattatatataatatatataattatatattatatagatgattctgactttgcacagttctgatatgcatgagttgcaattaccatgatttaaataataccagttccccaacaactctagtcaaatctcagttacccccgtgtgttaattgagtaattgcatgaagtacacaagcttgctgctagtgcttcagtatacaactcaccatgtaaataacagatgcatgtcagaatccgtggccaatcacagcacttctttcaaagcccatgggtgattggtcagtgcacatgttccttagttcatgcacagacagcagagtgtgtagttctgtggccttcttggctattggggataaaccagtgtgacattttacaaaaataccaaaaatcgagagggaattggtgaacgaagataaaagtgcagcaaagaagctgaaagtgataatgctagaagtgaaaccaaaacctacatggaattatagaagaaatagctgactgtgggaatattggcagtacagctgttggagagactgcctgcgcagcccgaggaggagaatgcaggtttaccacataaacaaggaaagtggttgtgaagaaaagaataaagctgtcctagaggacatgaccttggcaaaacaaacaaatttcacattaaaggatctctcagaaccatttcccagcatagaaaatgcaaaggatgaaatgtatgcttattcaaacttacggctcctagcagcactgttcacaatagtggaaaggtagaaacagcccagttatccatcagtgggtgaatagattaacaaatggatgaatagattaaaaaacagattgtggtatatccacgcactggaatattgatttaaaaagggacgaagtactgatacctgctacaatgcggatgaacctgaaagataccatgctaagcgaaagaagccagatacaaaggtcacatatgataaggttctatttatatgaacgatcttggtaaatctgtagagaaagaacacagatttgtggtttggtttctaagatcacagcaagcttatctctaagatcggggctggggcgcggtagggaaatgaggaacaactgcttaatggatgtggagattccttctggggcgacagaaaatgttttgcaaccacgcggacgtggtggttgtatgacattgtgaatgtactaaatgcgcttaattgtttactttaaaatggtgatgttatatgaatttcacctcgattttaaaaatgtgacatttcaccaagtcatagaaaagatgcttcgcttgtataagttatgcaacaaaaagataagcacttttaaacatttcttgataagttttttgtttccagggttttaaatggcaatgtgctgaatatttcactatttttcacttccttgtacatttataactgacagtaatagagtttttaatgctttgacaaaatttttaagaagtcacagaacaattgcattttttccttttcatcactaacattgttttgcaccgtttcagcttctatggacattcttatggtttcatactgagtactgcctgtgcacatgtatttcactacacccccgccccccaaccaacccctccaccccccaaacacatcccatacccattacagcacgttgttgcagggaggattctgagatgcgtcttctacaatagaaaaagatgtgctgggcttgctgtgaaaaagcagaggaagttagaggtgggatattagcggtgaagttggtagaacctcagctgcttctagggaagagggaaggtaaagtcagcaggtattagggaccaggggaagcctgtaacttataaggtatggtaactatcagagcagtttgtgggattggctagcagctgtgtggccagtagctggaagaaccagtggtctggacatgtcctagttttgggaaatctgtcggcaaggagagcgctaggactgaaggtacgatgcctgaagcccagaaacgcataatgggctgtgacaatgctgtttcacttgagctcatcggatgctttcgaggattcaattcatatctccctgttctccctgcattttgacacaggccgtgcttgcatggcagttgggttagtgtattcccctctccaccagagacttgggagggtaggggagtgtgccttagtcattcttgagactcctgtgcctggcagtgcctagcaacggcttaataaatacttgctaatgaacctaattattatgacattaagattttaatctaaatcttctaaatgactatgggaatctgtttatttttgcttaggatcattggtaatgttttctggccaaagctgcttttttgtctgagctgtgtgtttatttttcattcccgtctcttatttatattgtgaaaatgattaagaaaaataggtggtatggctcatggtctgatatcacgagtcaatgtgttgttttgaagccaactccacacataatggttcaagccctctgactacatcttagttttactccagattttctccatcaatgttgcttgcatttttcagtggtactttttggaaggaaagaatacgaaagccagcccgcaaaagatcactgggtgggggtcatagtctgtgatggtgactgaattatctggtaaagcatatttttgccgttttcagggtcaggcttcagcataatgagattccagaaattgttatgaaaaaagaaaccttaggttacccagcagctaaatgattactgcatcagctagcagctccggaatggccatttggccctgtagaaagatcattcttgggcaggctgttgatgtggagagtgagaggagcagctgttctttcacctgaggccccatctgggtagcagatggtccccagctaggcacaagccctgtgtagggacatccgtgctgcccaggatcctgggacactgcccaaatcaactgttaggctgggagcctgtgtccagaactgtggatggcattcactttgggttgtggaagttggtttgtacctactcttaagtcttgccccttcaactccagctcaggctttttaaccctagtagaagctttcttatctgtaggtatttaagataagtttgaacctactggtctgtgggaaggtaccgaaaaagccaaaagctgcagctcctggggagcttacaggctcccccttgttgagagtctcccgagtgctaggtactgtgggtttaagggagaccctgcagtggtcaaaaggctgcctggtgaaggggggccggttcccatacttctcagatgtgcctttgggcaagccacttgcctcctggtgcttctcttttgtcatctgttaaaggggttagtgaaggacccttctcatagggttgttatgaagattaaatgatttaaagtatgcagagtgctaagaacagtgcctggcagatgattaaaaaaattgttacagaaatacagtacaataacatttttggtcacatttaatcctcaaagcaatcatgcagaaagggcaattgtcatacctattttgcatgagagactcaaccactcgcccaaagtcacagtgctagaaaggacttgagccaggatctgaacctgtcccctgaaatcttcacctgctttgcttcttgacacgggcaggagaatgatgaggaagtgggttagtctgctagggctgctgtaacaactgcagatggggtggccaaaacctcagacatttatttatttttttaatataatcttggatgttggaagtcgaagatcaaagtgttgacaggcgtgggttcttctgagacatccctccttggcttgcaattggtcaccttcttgcttcttcacatggtcctccttctgtgtgtgactgtgtccaaatttcctttctgtaaggacacagccatattggattaggcccaccctattgacctcatcttaacttatttactcctttaaaaaccctgactccttatacagtcacactccgaggtactggggattaggatttcaatgtatgaattttggaggtgagaggacacaattcagccaataccagtaaatgattagtaatcaaacacagggattgaatacgcagatattaaggattggaatgaagccagaatttggaaggattagaactgatggaggcaggtgcttggtctgggtgatttttgaaaatgattttcaggccaggtgaggtggctgattcctgtaatcccagcacttttggaggccgaggctggcagatcacttgaggccaggagtttgagaccagtctgggtaacatggcaaaaccctgtctctacaaaaattacaaaatatcagccagaagtggtggcttgtgcctgtaggcccagctcctctggaggctgaggtgggaggatcactggagcctgggaagtcaagtctgcagtgagcaaagatctgtgcctctgcaccccaagctggacaacagagcaagaccctgtctccagaaaaaaaaaaaaaggctttcaacagagtcagtcgtggacaaagaggaagggacttttttcctcccctgcagctttaacctcccaggctcatatgatcctcccattccggcctcccaagtatttgggactacaggtacgcatgccactatgcccagctgattttttttttgtatttttagtaaagatggggttttgccatcttgcttctgctggtcgtgaactcctgggctcaagcaatcctcctgccttagcctcccaaagtactgggattacaggcatgagccactgcacccagctggaaaggactttttgtgcggtgagaggaggatcctcagaatacggagatctggggtccgcagacccattgtgggatgcacattgatttagtcagatcttgagtgaagagatactgtgttagctgactgcgtgataaacgttagcctgagaaattagtttgttattttgataggcatttgagtcatttattgaactaaaagctttggggtgcctcatgtactaggcacgaaatcacagtacagttcttatcaggggagagatcatttgggtctcagtttcctaaaagtagcttttaactccaaaattgttttaatctatgtttgtagaggaacatcatgaaaatattttgaaattaaacttcttaagtataccttaattttatactgttattattttatttcatttttatgtttattttttgagacaagtttcactgtgtcgcccaggctggagtgcagtggtgcgatctcagctcactgcaacctccgcctcctgggttcaagtgattctcgtgtctcagcctcccgagtagctgggattttaggcatccgccaccacgcccagctaatttttgtatttttagtagagacagggtttcatcatgttggccaggctggtctcaaactcctgagctcaggtgatccacccacctcggccccccgaagtgttgcgattacaggcatgagccaccgtgcccagcctactgttattattttaattagtaaattttggtataatagagactggattttgacttaaggctatctgggtttaaatcctggctctgtcacttaatagctttgtcagatataccatatgacataaataggcagagtttccatcttatcacctgtgaaaagtggataactgtacacatcacattggattgccacatgcagtaatggatgtggaggttctgtccagcattgtgtctttcccatgataggcacttgtgctaatgctatgcaagaaggtagaaagttgaaagtggatagctaaaagtggaggcaaattaagggacttcttaaaatatttttatttaatagaaaacaatatatagcaagaaaatttggatcaattctttcatgcattcaacaattgaagtctgagaaccagccgtgattaggtgctccaaattagaataaggcaaggctcctgccctcattgagcttccaggcaggcgggaagcccaggagggcgtgataagtgctacaattcaggtgtgttcaggttgtcatgcaggtattgaagagggctacttttggatttatgcccgcagaagagtttcacagtttctgaatttttgccccaggatgggagcaggcacttgcattaacatttgaattaatcacccagagaagagtggaaaagttatttcaggcaatggtaacagcatgtgcagaagtctagagggatgggagaggccacatggcatggttggaaaatagcagctcaggaatccatttgctgtgggggtggtaagtggaggactagatttgtgaaaggggacagatcacacaggctttgggaacaactaggaggtttttttttgttttttttttttttttttgagacggagtctcactccatcacccaggctggagtgcagtggcatgatctcggctcactcaacctctgcctcctgggtacaagcaaccctcctgcctcagcctcccaagtagctgggattacaggtgccccccaccacacctggctaattttgtatttttagtagagacggggtttcgccatgttggccaggctggtctctaactcctgacctcgtgacccacctgccttggcctcccaaagtgctaggattacaggcatgagccaccaaacccggctgactaggagatttttaagcagggaagcaatttgatgatatttacagttttaggaagaccaaactgacagcagcttggaggctgatttggaaaggaggcagagtggaaggcagggttgttgaggggggatgttttagaaagattttgtgatgattctgctgagactgaggttctgaacttgggctgccctacagcagcccaggaggacagattgcagagctttgagatagttggcatcaagatgggtgtgtctggggtgggcatgactgggtttctagcttgggtgtccaagtggataaatagcctttcatgtggaggctgagggcatgggcaggttgagtactgtccttcttccccaaaggtagctggccagccatgggagtcaatccacatgggatggaaggatggagaatgccagctcctctttaaagacttggccctgaagaatagagcttgcaattttgtatctagggtagtcattaagatccgttcacacaggtttggatctttaatctccagaatagagggtgggatgctccctgctccattgagcccaggtcatcatgtgacaacctgtgactaattaggcagtgagctgatgagattcgtgtggctcttgagctaagcttttgaagccagggtgagactctctggccctcattatctcagctgtggtgcttggcatgtcccagaaggtagccgtgctgtggacctcagtccccgagggagcgctgtgccacctccacccacgatggacctgccctgagagagaagcctttgttttaggctctttaagatgacatggggattttggtggtgtttttctagcctaatctagcccttcctgactcaagtttttgtgtaagagaccaaaccttgctcattttcttttccttagctacaaatcagttttgaacttaccctttttcagtatatgcctgtgcatgtgtatgcctttgtgcgcaggcagacaaatatagctaggaccaaaagcatttctgctgttaccattatccttttgtccaaggtatttttcaatgaactaaatgtcagaaacacacacgctttcttaaaaaagcagctttattgagatatgattcacataccttacaattcacccatttacagtgtataattcaattacttttattatattcaacgttgtgcaaccatcattatgatgttaatttttttgtttgttcctcttgttgagacagagtctcactgtcgcccaggctggagtggagtggcacaatctcggcttactgcaacctctgcctcctgcgttcaagcaattctcctggctcagcctcccaggtagctaggactacaagctcatgccactacacccagctagtttttgtatttttagtagagacagggtttcatcatattggtcaggctggtcttgaactcctgacctcaggtgatccacctgccttggcctcccaaagtgctgggattacaggtgtgagccactgtgcctggctgatgttaatatttttattacccataggaagcctgtacgatataaccatcaccccccagttctcccacacatccctctccccatccctaggcagcctctaaactactttgtatctctacattttgcctattctggacatttcatataaactgagtcatgccatgtatggttgtttgtgactggcttctttcaattagtggagtgttttccagggtcatcaatgttatagcaggtatcagcacttcattcctttttattggtcaaatactagtctgttgtatgggatacattgtgttataaaaccatatggtttctagagatggaagccatgctgacccctgtagagttttgtttatccatttatcagttgatgaacatttggattgtttctgctttttgcttctatgaacctctatgtagtacattcttgtacaggttttggatgaatatgttttcatttctcttgggtttatacctaggaatggaacttccagactgttttccaaagcagctcaccatttgacattcccccccagcagtgtctgagggttccagtgtatctgcatcctcaacaacacgtgttgtctgtccagtgatagccatcctactgggtgtccctgttgttttatgtcatttaacaccaaacttagatcacatttctgcattactgactttgcacataccgtccccaacttgcaacttatgctgtcattaacttgtgtagatttatccatgtttggctgtttatgaggatttgtccgtgtcaacatgtatgtttcataaggacattcttaccttccattaccagacctacattctcaatttaagatttgatattttttcagtgtttaggttttcaattgaatcaactgacaagtttagtggcttaaactttcaagcttaaactgaaatgccaatcttgttttagaccaaaaattacatcctatctcttctcttaattgaggaacttaggtggtggttcctatttgtctttatttatttatttatttatttatttatttttgcctacttcagtttggtcggtaaactatcaattgtattttcagtatgtatatatatagagagagagatttttaaaattttattattattttttgagacagagtctcactctgatgcctaggctggagtgcagtggtgtgatcttggttcactgcaacctccacctcctgggttcaagtgattctcttgcctctgcctcccaagtagctgggattacaggcatgtgccaccatgcccagctgattttttgtatttttagtagagatggggtttctccatgttggccaggctcatctcgagctcctgagcttaggtgatctgcctgccttggcctcccaaagtgctgggattacaggcatgagccaccatgcctggcccattatatatacatttttaatataatgtgaaatcatgtggtctctactatagactgaatatttgcatcctaaaccccaatgggatggtattaggaggtggggcctttgggacgtgattaggtcctgagggtagagccctcatgaatgggattagtgcccttataagaagaggccaagtgagcttgtttgctccttctaccatgtgaggatacagcaaagaacgtgctttctgtgaaccaggaagtggccctagtcagacactgaatttgccagcaccttgatcttggacttcccagcctccaaacctgtgagaaataagtttcggttatttataaaccacgcagtctgtgatagtttgttagaggaacccaaacttaaaggcagcttctaaaggggagcaatgctgaccactctgtagtttgtatatttggtcaacacactttattgagtgatgagtctgaatttcatgcttgattgatgatgattggtgacagagtagacaaggtccctgcttcatggagtctatggtctagttggggaaatatacctttattgaatcaaggcagatgtgattacagattgaacaatggctgtagaaggaaagggatttccaagagagaattagaggggcttctcaaattgagtttgactttctctttggtgggggttgagtcaggaagaacctttttgaagcaggaaaaatctttagctgagacctaaaggaaggggaggagcttgcctgggaaggacactgtggtggctggagggggtttcccaggcagggacactctggcaggttagagtaactgaaataaagtctgtattggagtgcagagactgccagaagaggggctcatagaggccaaagtgggacggccttacggacgagctgataatttgggcattattcaaggtggggtgctatgtcattgaagggttttagcagaggggaggcattatccaagttaaagaacaaaacaaaacaaaacccactctagttgctgtgtggcagatggattgggattgggggtgtggggttggtggcaagaatagatgcagggggacaagttatgaactgagactgggacctcatgggtcttcctgcccaagaccgagatggctgggggtgggggctgcagctagggacatggggcctcagtgcccacgttttctgtcctctgtcccctgtgagggtatgtgcgctctcataccagccgccgggcactttggctcgcttgtgttgctgggagagatctcctttaatgtttttttgtgtttttaaaatatgaacgtaggccctggcagagacaaggcagaaaccacttttgagtttttagggccgtgcattcttaaacaactctgagtgacccttccatcattacaatttatcaactaaattagaaaacgtgctttcacagatttctagtacttgggcaaatttgttatttacgctcaagatgaagtgttgcttctagtgacagttttgctgttgggcagcatttgtagggtaaaggtgtttttgcttttggaatccattgggagatttaaaaaaaaaatatatatatatacacacacacacacacacacatacacacatataaagtaaaaagcaggaagtctatgtgtgtgccaggggatcccaaactcttggcctccagcagtcaagagattttttaaaacctttatcttttaccgtcttgctttttaaaatccattatgtctttgtatagtacttgacatacatgggcagaagtcatgctggaacgtgaagatgggagcatggactttctggagcatcccaggtggggttcctgtggctgctgtaaggcaggaccgcagagcggtggctgcagacagcacggatttgctattatatctcatagtcctgtagggtagagtctaacatgggctaaactcaaggtgtcgccagggctgtgttcctcccggaggctctaggagaggatccccttgcctttcccagtttctgcaggacatctagcagcctcagctcattgtcccctccctgcgtttgcaaagccagcagagtagcatctctgtggccattcccacatggtcacatctcctcctgggatgctctccttctgcctccctttgcactttcaggagcccttgtgattccattgtgtccatctggataatccaggataatctccctattttaaggtctgctgattagcaactttaattccatctgcagccttaatcccccttttctgtgtaagctgacctagtcacaggttctggggattaggactcgcgcatcttgggggaccgtcattccacctgcggcagtggtaggctaaaccttaggcgtctgatattgtgaacctggctcactggcctttgtcttcttgccgactcctattggtatttgcctgagatgtttttcttttctttttcattcttttttcttttctttctttctttcttttttttttttttttctggttctgggcccacagtaggtgccttagaatcatgcagtccagttgccttctgggaatccattgtagtaagtggtagaggtttttaaagcagtcctaggggagatgcaattccctgcttacattcaagtttttcgggaagacaagtctgtttaggaaacataggaggttagttgcattttcctcattaatgcaggatattaaaatattcagagggaacccaggagtcctctcaagatgagtttaaatttctcatacttgtagaagttgttgagaaacactggattctaatttccagaactctggtggggaaggagactgtgaacctggtctgaattgagaatggggattgaggatttttggacttttgaaagattgacttactctctcccgttagttctgttgaactgctgcctaaatggagggaatgtgcatcctgtcttgtgttgtgtggcaatgcagtggggacacttgggacatgagcaaaacgttgacagaggggagcacttcctggaatattattaatacagagttagttttaacttcaccttttgggcaaacttgacattatagatcttgaaataggattatttttcccttgctaagaggttagcaaaatcagtacagtgtgtctctttgacaggccctagaaagcactctacgtttgttaactttaaatttgggtcggaaattgatgttattggaggagcaaggcgtgtttaggcctgatgatttttggatagcttgaccaaacccggtacagccaactttcccccaaaactactgtgtccttctcagtggttcctgtgcctgcacagggacccagcgcacaccccagtgtgcctctttgggctctggctaacttaggctgacatcctgatagaacgcagtgaccacctggtcatttgattacagcgcttcttccagacagcacgctcagaattgcgtttcttacttccagtcttcttgccctgtaagcattttctgtgagtcaccaaatcaaacacaaaatcatataattttatggaagtggaaaatcagacttattaaaatactgtgtttttgttttaaagctcagaggtatagagatccatgaatttttttccatgccttctcataatgtggttttggtttagctgcggttcttccaggcgcagatgtcagccctctgcagatctgctgcatcagaatttatggcctgggtcttaggaatttgcaatttaaaataaccccttcaggtgcgtctaatgcagcctaaatttggggccagctcatgggttgtaaactgtactgccctatacaatagtagcacagttctaggctcaagggactcaagggggtccagtaagtacagttcaccagagaaataacaaaagcattagcagagggagaccagagcatcatctttgttagggcaaaggcttaacatagaggaatgtggcttctatgtccaggccagtgggcttcctaacacagaacatggaattaggcagacttaacatcccccatgcccaccccggtgagtgccagcatgggcttgagctgctcttcacactgatggtccatcctttggactgatctccttgtgaaggatacaatacagcaaggagcgggggcttggcttggcacagccagttctttacccaaactcctgccaacgctggcccttctttcttaccctggttggagtgtgtgagggtgggagaggcaggaggaatatgctggacagagcttcttccatctagaagggaatttcaggagtaagaaagcagcagctcttaacatacctgggagaaagcaagtgcttagtaaacagttgaggaatgaactaagaattttcagacagattttcctcttctggagcatttgcagaaccgcctctttgctcaagtgctttgttttttacagattcatttaaggtcatggttccagacactaatgtaaatcagcacatatattattgaagaagtagaatacctccaggcccagttgccttggagcaggaaaaacagttcatcctcattaccatccagaataatttatgttcaagataatacacaatcaatttactttttatcatattcaaatttgatttgtgtacacttttgagtttggatgtcagccacattgcttctgtgtgttaatctttatttacgggaataaatgggaagcagtcagccattttttattctttattggggaactgcattatagtggaaaaggtaaaattataagctaatgagaccagaggtctgtatgtatgaaaaccgtcctcatcgcttcacagttgtctttgaaccagtttccctgggattgttcgaaatgtagcaaacgtggctcacggttaccctgacggggccagagcaatagggggaggtgtgggcacctgtatacatttgcgttgaaaaacgtacccgggctattctgaggtcctttcctgcccccagcctggtttctgggcctctctggagtctctctttctggcacttgtgttctggaatcgcttatcagcctggactccttcagcagcagctgccacagtgtctttgtagtcacactacacacctatatactccatgacatggagcgtatagaatgtttcccgtcttcctcgtcagtgctgccaggagaagcttcccctctcctaacctctggatagtggctggctctgctttattcaggcattgctttcattttttagaacagctgctccagtatgcttagtgtgaatgacagcccagcagaaagaatggacttgacactggacactgcaccactccacatttctttgtcccctcaagatgacttaactagctcccttcccttttccttcatgcaatagcctcagaagttcggctggcattgccaagttgttagagtgaaccttaacctgtgtatgactcagaattcacatctgctgtgtcagtgaacacacagatctctttgtgaacacatggttatcaagaggcacatgctcttacgtatcctgccggattctggtaaggcgctgcttgcgcagtaagcacttgtcaggtgcttatgatgcctgtgacgtgaggctgtggatgcagaatttgtggtctgaacatttttgagtagataaaaatggaaactgaaattggtgaagcagacttgtggcttttcctattttctcatctcttttatggatataactagaagctctgcttcatcaatgagtgtgttaaaacaatttgtttacaaaatcctatttattaaaataaaaatctgaaagaactgcgctgctgcttttcagtgctcgccactctaggaacctgtattcctcctcttgttcatcctcccttttcttcttttttgttttgttgttgtttgtgtgtatgtatgtgtctgtgtgtgtgtggcggggtggtgggggcggtgttgccaaatcttttgcactgaatctttgaagatgtcctgaaatacttaccaaatcactagagcgaagagaagcccatctgatttcttcatctcccagctgaggaaggacacactttctcccactctccagtgaaggcccctgtgtcctgtgggtgggggagctgacatcacactcagtgctgacatttcttgttccctgggtgggcgctgattccagatcctcttcagccccccaagcggaactgggtttctcttgaaggtcctaacctcagctcacaccacctgctactacctttctgggtcttggattttgttgttacccaggcccggggtcatcccaaaggctcttgatagccctgtggctgtgcttgctaatacactgtcctcatcttttgtcagcgaagtaaatccaataatgtttccttctctttaatccaagccagtcttcattgaaaacacttcacctctaagctctcaggctctgcagtctgccctctccaaccttacccctcatgccccaccttccctttgtccccatctttcccttctgttccagtcattctcatgggccatggagagtggaagcctgggagggctttgccaaagtccagttgcctgctcactttcctaagggccagagcaatgggggaggtgggggaggtgtgggcatctgtatacatttgtgttgaaaaaggtacccaggctattctgaggtccttttctgcccccagcctggtttctgggcctccctggagtctctctttctggcatttgtgttctggaatcgcttatcagcctggactccttcatcagcagctgccacagtgtctttgcagtcacactacacacctttaccccgatccactgacctgctgtcccggatggccctggtgtgttctctctgttcctagccgcagaaattgctggtgaatgtcaccaagctaagcggtgtagctttataacaagtggattcagccagctggggctggacgactgagagtttgcagcccctgctggaccctgtgtaactgtccagtttgcctagctattggtttggcccagtggttttcaattttggctgcacatcagaatcacctgggggaggtttaaaaccctacctctgcccccatgccctggggttcacacccagaaatgctgacttcattggtcgggggctggcaggcctggacattggcggtttgcttagaagctgcctgggtggttctcatagcagccagggtcaagcaccacggcctgttcttacctggctccccaggccccctttaatctccctctgcagcagattggcacacatcgcattgtggagcaagccatctgataattttccttaatcgtctttgaagatcttccctctgcctgttgatcctttaaggaagaagtctccttgccaggatcggcctctccagtctctggatcccttcttgcttgctctcttcagaacccatgaaacctctctggctgccttgacgtcagccagattggactgcccaaatagaaaggcagaaatccctgtcgaggccagacagcaaggatggagaggggcagggggtgaaatgaaacgcaccaggaggagtaaagacaaggccttctgatgtcagccaagagcaggtgtggattaggcagtcctaagtttgagtcctggttctgctattcattggccaattgtattctccctccctctacgatgaggttaattacagttacctcactgggatttgtgaggatggaatgaggtaacaaaacataaaatactatcagtacaatgcccagctcataatgagtatgcagcaaatgttcaccctttaaaaaatgccacggccgggcgtggtggctcgcgcctgtaatcccagcacgttgggaggctgaggcgggcggatcacgaggtcaggagatcgagaccatcctggctaacacagtgaaaccccgtctctactaaaaatacaaaaaaattagccaggcgtggtggcgggagcctgtagtcccagctactcgggaggttgaggcaggagaatggcatgaacccgggaggcggagcttgcggtgagccgagatcacgccactgcactccaacctgggtgacagagcaagactccatctcaaaaaaaagaaaaaaagtccctttctaccttcaaattcaggaaaattttctttagtccaacagatgtaatccccccctcactcccccatccccactggtatctttatgtactcaggtgactattaccatattctgcttggactgtttttatacattgcagataatttgaagatatggatttaggtaggtttttagatttataataattaagtgatgtttttctatcaagtgatgaaagtttcaacagatatttgttaaaatttaatttagccaaaggaagacatgccatttcagcaatgtgatctaagtaaaagtgtcttctcttttttttggtggggagaacagagtgtagaatgatattagtaagatagagaattgatgaccaaaccataactgctagcattttagtagaggacacaacagagaaaggattctcacgtgtgttattaggatcttggatgagagtgggctgttattttaactttggcccctgttggagcaaattactctttgggggcccggttttcctcaggaactacctacagaattcagtgagatagattttagaacccttctgaatgctgctggtttggagattctgtctgtagcaagttttgttcagttgttaatctttctttcttttctttcattctttttttttttgacagggtctctctatcacccaggctggagcagtggtgtggccctggctcactgcaggctcaagcgctccttccacttcaactgcccaagtagttagaaccacaggcgagttccactacagctggctaattaacaaaaattttttttgtagagatgaggtctcactgtgttgcccaggctggtctcaaactcctgggctcaagtcatcatcctgtgttggctttcgaaagtgctgggattgcaggcatgagccaccacacctggccaactatatgttttctatgtttattatattttctgatttgtaatgtattttaaaattatcccaataatatatgaatgcaatcttgaaaaatactcagcatagcctttaggctaaaaagtggaggtctgccatttctctgccttgccccattcccttcccatgtcttattttccctgttaccaggttggtgtgaagcctttgagacctttttctctgcacacccatatatgtgttttttctatgtttttatagtattgtttcatttaaaaaataaactaggtttttgaacttgagaaatttcaactcgttctgctcagagctttgttttattaaaatcagtgcctgggagttgctcaagtctttgggctgtgtcgccctctagtggtagccctttggcttacagctgccattcagccctagggctggggtggaagtgatggttttgtgcccacaacctgatggcagggttggcagtgtttagttgctgacaagtgtctaaaactcaatctaggccgggtgctgtggctcacgcctgtaatcccagcactttgggaggccaaggcgggtggatcacctgaggtcaggagttcgagaccagtctggccaacacggtgaaaccccgtctctactaaaaatacaaaaattagccgggtgtggtggcgggcgcctgtaattccagctactcaggaggctgaggcaggagaatagcttgaacccaggaggaggttccagtgagccgaaattgcgccattgcactccagcctgggcaacaagagcaaaattctgtctaaaataaaataaaataaaataaaatataaaagtctggtgagccctggagtggtgtttgccttgctacctccaacttgccctttttaagagacttaaaatttgtggtaacttttcacatgatgtgtatttagatactgctgagttaatgaggctgctatacctggctgatttattgtttgctttcaaagcagttgtcaagtggtgtccacccatcccactgatggattttttttcttttttctttttcttttttttttgagacagagtcttgctctgttgcccagactggagtgcaatggcatgatctcggctcactgcagtgtctgcctcccaagttcaagcaattctcctgcctcagccccctgagtagggattacaggtgtgtgccaccacgcctggctcatttttgtatttttagcagagatggagtttcaccatgatggccaggctagtctcgaactcctgacctcaagtgatccacccacttcagccccccagagtgctgggattacaggtgtgagccactgcacctggccccactgactgtttatatctgttatactgttcttgcctctgtgccttttgggttccctgtcatggcagcatccttacatcctccaccacctctgaatgttcccgcaccttctctttctaatggaagcctggctggcccttgaagacaccgccaaccctgctggtctcttcacagagtatccacccagcaacctggcctgtccattcttgacttcttctggtccagctgcctttctgtacctcattttagtgaccctttttagatctcgtccaggttagcctctagaaccctgatctcaggcaccccactctgcgatcttccgttcccagccttcccacttgaaatcgtcttggaaatcccgggctttgccaatctgtggacccaccaccttttcaccccctttccggtgccctcaggggactttgctgtagcctgaacctcatggtcccttcctgtaaacagccaaactgctttgtactccctgaggagacccccgccccggttggacaccccaccctggttaaacccactttcacaattattccaaaactgccaactggacttgcatctcttcagatcggctgtcatcactcattgtatcaggaatcttattacacttttgcagcagtttcatcggttcagagaaaactctttcataccttctgctcatcagttctccacacctcccatcattctcctagctgatgactttgctgcttgtctcattgaggaaagaagccgttcagtcagtgagaccccctgtctcgcctccacctttccacctgctgccgcggaggcttccccagctcctgtctcactcaggccccttgccactctcaaggcatcttcttcctgcttcccaaggatgtcactcctgcagttaaccctttttcctcctgcattattcgtttcttcctttcttccgcatccttccaaatagcgtaaaaacaggccttatgacgtttctctttaaaaatgtccttaccagtgccacgtccctcttggccactgcccctgttgtgcctcactccgtagaaagaagtgacctgtagagactatatcctgccctctccagcgcctgccttccgattgccccttccagtctagtaactgtgtccattccttctccaatgaccgggtgacaagctgtcccttctgagagtgccagagggtgttccccgggtgggaggccggatgtcagtgccagctgtgctgtcctgggtgagcctgtgagggaccacatctggtcagactcgtgcatggcctgccctcatcttcctccgcctgcggtgcctttgagagcattgactccactaagcccgatttctgtgtggcatgttgtctgttcctccccggcctcctcgatggctcctccttggtctccctctggctactcctctgcttctccgcctccaagtgctgctccaagtgccttctgtgctctgtctccatccagcccaaaccttccaacactctctgtaagtggaatctcaccttgaggctgccagcccagcctcctcacctctgtgctccatctttagagagtcacctctctgtctggcattcccacttgaggaccaagatgattctcaaccttaacgtggcccacatggagccgctgctcttcctgcccagatctgccttcaccaccacatcctgcccactgtcactaaacggcaccagctcttacctggtttctcagtaaaaaaacaagtttatcatcttccctcacatactttattcaataataatcactaacatttattgagtgcttcctatgtgcctgacaccattctaagcatttgaagaagagtgtattaacctgcatgagaaaggctattaaaacctatgtaattaattaattaatggatggatgtgtggatgaatgaatggcagggtcttacactgtcacccaagctggagtgcagtggtccaatcatagctcactgcagcgtcagactcctgggttcaggcagtcctcccacctcacccttttgagtagctgggactacaggtgcttgccaccagctaatttattaaaaaacattttgagagatggggtttcatgatgttgccaaagctggtctcgaactcatggcctcaagcgatcctcccactttgacttatagattgtggggattagaggtgtgaggcatcgcgcctggcctgtaataacctatttgtgaatgagaaaggtcaggcacagagaagttaaataatttgctcacagaaatttcctgtgttgcagctgagatttaaatccaagcaatgtgtttctaagcctgggctcttaactgtaacactgtcctcttccccccaccaggagggtgtgtgtgtgtgtgtgtgtgtgtgtgtttctgaatctgaccagttgaggcaggctttcatgtcattctctctggccacccccttctttgttcacctccagtctttggaatagtcagagcgatgtgttcatggtagaaatgaaatcacatcaggtcctcagtggcccatcacatttagaactaaagctcacccttgcctcatgcctctgagcccttatatgatctcgagtcaccaccccactgccagcctctccactctcttctctgtgcctcatgcagcccaggaaatataatttggaccgcaaatgccagccacctatgtacggtaacttttctagtagtcacattaaaaagaaaacaggtgaaatgaattttaatgcattttagttaactcatgatatcaaaaatatttcaacatgtaatcagtattcacacaaagattaatcaagtatttaacagtcttttcttttgatccggggtcttggaagtttgacttaccacctctcaatttagccagccacatctccagtacttggcagctgtttgtggctacctcatggacagggcaggtcccgccacccgggcatccgtctgcctggcgcacgcaccaaacgggttccagtctggggaagttggcatctgctgttgttacttttggtcagaacgcccttcgcctgcgtcctcacggggctgactccctttagccttgaaggggaccgttgctccgagaggcctgaacactccagctgcagctttctccccagtcattattgagatcaaattcacatctcttacaattcacccatttaatgggtgatgcaatgcggtggcttttagtatattcacacacatgtgcagacatcaccatagccaattttagaaaattttcatcagctgaaagagaaaccttgtatcctttagctatgactttgtgattccctgttcccctgagcccctggagaaccctatctttctgtctctgtaggtgtgctgattctgaatattttgcataaacggaatcatactagggggtcttttgcttgggacccctttcacgtggcgtgtttccacggcccatcccgtgtgatagcatgcatcagtacttcattcctttttatggcagataatagcccattgtatggatataccacctgtttttttaaaaagtccattcatcaattcatgagcatttggtttgtttctactttttggtagaatgatgctgccatgaacacttgtgtgcaggtttttgtgtggacatagacttaggaatggaataaccatggagttacggtaactctacatttaagcatttgagaagctgctggcctgtttttcatctgcaccatttgcattcccaccagcatcgagtgggagctccagtctctccatatcctccccagcagtcggttacccttttctgttgcctctgtagcactttctaaacataaaattagcttatttctttgcaggtgtctattgcaccccccaggaatgtcagttccctgcagactctcactctgccttggcacccgcaccccagcacccaggggtgaggtgcctgcctgggcagccctgtcctcacctggggttgactgaccagagaacccttgcgattctctctctgggtttctgtctgcattcctgtcgggataggtgagactggggtgacggctgctcgcggcttggtcaccttcttctctgcttacctgttcatgctctcttgcttttctcggatagcaaaccccgtctcctgtcatcctccctcctggcggaccagagctatactggcccataaaggagtgctggccacaccaggctagattccagttgagcttaaataaaacaaatagaaaggtcctccgtggtattagccatattgtaggtgctccgtagacacatgcggctagtggctgcccacaggacgctgcagatgtggacgtccccgtcatcacaggacgacattctgtgggcagcgctgtatttgtttacaaacacaattctttggctgtgtgaaggttcaggatgatacctttgccattatgattcatttattcatttcaggctggacacggtggcccacacctgtaatctccacactgggaggccgaggcgggaagatcgcttgaggccaggagtttgggaccagcctgggcaacatggcgaaacctcacctttatttaaaaaaaaaaaaatcggccgggtgcggtggctcacacctgtgatcccagcactttgggaggccgaggcaggcggatcacgaggtcaggagattgagaccatcctggcctaacacagtgaaaccccatctctactaaaaaataccaaaaattagctgggcgtggtggcaggtgcttgtagtcccagctactcaggaggctgaggcaggagaatggtgtgaacacgggaggcggagtttgcagtgagcggacatagtgccactgcactccagcctgggccacagagtgagactccgtctcaaaaaaaaaaaaaaaaaaaagaatcaacatttatttatttattatttatttttttgagacagagtcctgctttgtcaccgaggctggcacgatcttggctcactgcaaaccccacctcccagttcaagtgattcttgtgcctcagcccagtgccaccatgcccggctaatttttttgttttgttttgttttgttttgctttgctttcctttgttttgttttgtttgagacagggtctcactctgtcgcccaggctggagtgcaatggcacgatctcggctcactgcaacctccacctcctgggttctagtgattctcctgcctcagcctcccaagtggctgggactacaggctcccgccactgcacccggctcatttttgtatttttagtagagatggggtttcaccacattggccaggctggtctctaactcctggcctcaggtgatccacccgcctcggcctcccagcgtgctcatttatttattttagcatcccttcttgtgcctggttgtaaagttcttcttatcccaggaaacttaataggtcaaagaaccctccccttgaggcagtttggatggggctggctgggaattggtatgtccagctgcccatatcgtggcctctgagtcaattatacaggcatctcggcaacttgaagttttgagtcccaaaacaacagattccatagcataaacagtgcaacgtaaatcctgtcccttgtccctcttccattggatacccttgtttatgttctctctggcaactgcctgtagcagggacggatgctggaaatcctggcggggccacgtcttctgtgctttgtaggcagctatggctggatggtgcttgctgtttctgtgtgtaaatgttgggatttttaaaagcccttccctgcttaatgcgttgtggttgagcagcacatttaaatgcctgaagtgtaagatgaagtctcttggatgtagagggcagtggtggtttttatttttcctggttgaacttggcctttggattgctgactgcgagctcacggtactgttaatgattttctacctacagtcacctgctgtgctgagcacatcaaatacagtgcggttagttccaagctatgaagcgcctgtcacgcatgtataacaggcagacctcattaggagggggccttgcataggggtcacattttccagcatttgttttcaaaatggaaatccagatcacgcatttgagattaaaataaaaaaagcggcctgtgctttatcattttctttaacttacatgcctgctggtccagcccagattgctgatagaggaagccctgagaaagttgcccagccagttgcccgtgcttcaagacacaaagggctgactgaggcatccgtgcctacccttggctgctgctgctcagcctgcttgcatctcgtctgttttcagttatcagtggtgtgagaaaaacacaacggtggattcagaaggagaaaccaagtcatctgcatttggcctcagtgtgtggactgtcctgaaatttgagtacagatgtgttcatgtcctgggattagataaaaagagaggaaacacacagtgaattcttatggtctgtcatttcagttggccatcttctgcccctctgttctggaagcttctccactaaaatagagcacccaacttggttttctacttgctttctggcccatcttgagttggaggaatcatgtgtttcagaactcttgctggtggtgggtgggagatcaacaaatgatttcattaagctgtgtgttcttaataaactttgggaagatttgtcgcagagaaactcagatagggaccttgtgatctcagcagtcatgggtttatcttgtccacacgcgtggcttcattgggatttggttggttgcgatccagcagaactgtggcggtgttgggctctgttggggtttggttgtgagcggaactgtggtgttgggctctgttggggtttggttgactgtgatctagtggaactgtggtggtgttgggctctgttggggtttggttgactgtgatctagtggaactgtggctgtgttgggctctggagtttggttgtgatctagtggaactgtggcggtgttgggctctgttggggtttggttgactgtgatctagtggaactgtggcggtgttgggctctgttggggtttggttgactgtgatctagttgaactgtggctatgttgggctctgttggaatatggctgtgatctagtggaactgtggcggtgttgggctctgttggggtttggttgactgtgatctagcggaactgtggctgtgttgggctctgttggaatttggctgtgatctagcggaactgtggcggtgttgggctctgttggggtttggttgactgtgatctagtggaactgtggctgtgttgggctctggagtttggttgtgatctagtggaactgtggcagtgttgggctctgttggggtttggttgtgagtggaactgtggtgtcgggctctgttggggtttggttgactgtgatctagcggaactgtggctgtgttgggctctgttggggtttggttgactgtgatctagcggaactgtggctgtgttgggctctgttggggtttggttgtgatctagcggaactgtggcggtgttgggctctgttggggtttggttgtgatctagcggaactgtggcggtgttgggctctgttggggtttggttgtgatctagcggaactgtggcggtgttgggctctgttggggtttggttgactgtgatctagcagaactgtggcggtgttgggctctgttggggtttggttgactgtgatctagcagaacagtggcggtgttgggctctgttggggtttggctgtgatctagtggaactgtggcagtgttgggctctggatttggttggttgtgatctagcggaactgtggcagtgttgggctctggatttggttggttgtgatctagcagaactgtggtagtgttggcctttgttgggatttggttggttgtgatctagtggaactgtggtggtgttgggctctgttggggtttggttgtgatctagcggaactgtggtggtgttgggctctgttggggtttggttgtgatctagcagaactgtggtggtgttgggctctgttggggtttggttgactgtgatctagcagaacagtggcggtgttgggctctgttggggtttggctgtgatctagtggaactgtggcagtgttgggctctggatttggttggttgtgatctagcggaactgtggcagtgttgggctctggatttggttggttgtgatctagcggaactgtggtagtgttggcctttgttgggatttggttggttgtgatctagcggaactgtggtggtgttgggctctgttggggtttggttgtgatctagtggaactgtggcggtgttgggctctgtgggtttggttgtgatctagcagaacagtggcggttttgggctctgttgggatttgcctctgatctagcagaactgtggtggtgttgggctctgttggggtttggttgtgatctagcggaactgtggtggtgttgggctctcttggggtttggttgtgatctagcagaactgtggtggtgttgggctctgttggggtttggctgtgatctagtggaactgtggtggtgttgggctctgttggggtttggttgtgatctagcagaactgtggcggttttgggctctgttggatttggttggttgtgatctagcggaactgtggcagtgttggcctttgttggaatttggttggttgtgatctagctgaactgtgatggtgttgagctctgttggggtttggttgtgatctagtggaactgtggcagtgttgggctctgttggggtttggttgtgatctagttgaactgtggtggtggatcccaggagctgctgctgcttgtgcgcttcaaagttggattttgtgtttttttgtgtgcagatgcttcttggaatcttgcgttgctgtatgcctgtatacctggaaagttgtgggaagaacagtttaggattttgaaccaattttctcaacaagtttgattatttcatttgagacatgttctgatgtaaatatattctgaaaaggtgagatcaaacatccactttttactctaaagcaggtccccttgctcctctctgctagtgcattctctttcctttacagctccttctcctttctgaagcaggaattaagctgaagtaactcagaaagtgccagcgttaaccccaggggacagaaaccacagacccagggctgagggattgagtttttaatttccattattctccatcagtgcgttcagtcttttgaacttaccctgactggtattatcacttgaaagttgttgttattgttgttttgatggtagtggtggtggttttttgccacccacaggagagaggggattagaagaaaaagaccaatggagtttccttgggattaattaaatgtggggctgccacacaggaatgggtccaagggctgctgtatttaaataacttacttattttgcagaggtgaatttaacctaacatgtactacagtgatggagtaaaccttttcctgtttggaatatcacaaaaggtacttcaataattgcggatcttcctttgaaccctcctattgtcagatggggtagtggtacagttccttgttccagaatgctcttagcaagttgattaatctgtcacataccccagtttcctcattcacaaggtggcataataataggacatagagttgccgtgaagtttaatgagttaatgaatgtatgatgcttggcaaatggtaggggctcaagccaaccctcgttgtcttactgagcttagtgggccttggacctgctgaggactttgaactgagcattccgtgttattctcttttttgtttttttaaggggatgagagtgtgtgtgatagagttcatgacaatattttgtttaagaaaattgtcaaaacaaagttcaaatgcaatggatggaaagtgatttttaacatgtagggtaactagagatttgagatcagacaaatcgattaggagatcaccaaacccaaacagagaatgtgagttaactcatacttaggagatgaatgctggctttgaagaccatagcgtgcattttcaaaccagatggagaggccacttttctctgcagatttcagttattcgtgatgttaaatgactcgtcttctcttacttgcctggcatgtggaactgagtaaattctgtcaaaagaactcactgaaggaatgtgtaacagctgggaattggatgtcttttcagatttgggagagcctgtgttttgactgtgatggaattcttatggtttaatatgcttaaatattactgtttaacattttgacgtttttgaggacagggataattaggagaatgcacttataagtttctatgccaactgtttccactgctcccctgtttacatggtcccagggtttatacagggctctctgtagccccacaatgaatcttgccccagtgagcgggctctcacctcccttctatagatgaggttggagctcagaagaacgtagagaaacttgtgcatagttattatgccagatttagcagctggaacaggactggaacctaaatcttttttctttagataatatgttctttgcattaatgagtttgtgggttttttgggaggtgagaaatatgtgtaaataagaagtaaaaatcctaaattgcaagttgattttttttcttaatatagtaatacgtataatgcagcaaacatatcatttcccctccatgcttgctagactggcttatgcacacatcatgatgataatgaaggagctaacatagcaagcactcactctgtgctcattcataaggtggcataataataggacacagagttgccatgaagtttagtgagttaatgaatgtatggggcttggcaaatggtagatgctcaagccagtcctagttgcctttctgagcttaggaatcatggaatcatgctctaaaaacttcatgagtatgagctcgcttcatcctcataacaactctaggagatagacgttactttatgtccattgtagggatgagagtgtgaggtatgaaaggaagtgagcttaatattctttatttttattttttatttttattttttgagatggagtcttgttcactggcccaggctggagtgcagaggcatgatcctggctcaccgcaacctccatctcctgggtttaagtgattctcctgcctcagcctcttgagtagctgggactacaggcgcgtgccacaatgcccagctattttttgtatttttagtagagacggggtttcaccatgttggccaggctggtctcaaactcctggcctcaggtgatccatccgcctcgggctcccaaagtgctggcattacaggcatgagctaccgcacctggcctaatattcttaatttggctgtcggttgtcacccaaatcagttaaagcaattccatttcttaagtgaaaatcagaatttcttttcttttttccccttctattttttcttttaatcttttttcttttgtcttcaagcaattttcatttttttttttttttttgatattcagggaacctgaggcgaatgaaggggaggaacctgggagctactgactgtgattacagtggatattcacaaaggaagacctttagtacagtgtgaagtagtgagggaaagggtgatggagtaggagggatttaagtaaaacctttcaggtttaaggtcaatggaaagcgaaggaacattctagaaggacattagattttccttagagtgacattagagtttctgtaattggactataccctttagtgcctcaaatcaagggtttcacattttcttttttttttttggaattgcctgctcatgtatttccatctccttaaaggcaagggctggccgccttatttggctgatactagcctccatggcatcagcctgtccagtggaagtcctgaaacagtacacgatgaatggataaatgaatgaatgaatgaatgaaatgaatgagggaagaaatgaatattgtgcttccagaacgaggagagaagggacgatgatgtggcaaattggcccagcatcttaagatctgtattgactttagcctcatgtggtagtttaatgatactctctcttactcagggaatgtgccttttaagctgtggtctgtggtcaatgtgtgtgcacatctctgagagtcctggctgtgttgtgtttgtgatggctcccatatgtggtttgcctttgtatctgattgtaaattaaccttgacatgtaggtcacctgaccgtgtatggagagagaaaaatcactttcttcttctctacaagctatgtgagtgcagactgaagttccgagttgtgatctcaagcagtctgcagaaactaacctttggcatacttggccacagccgacttctttctagtaaattcccactggttcttggcttttcttgtagaattaacacatttgcaaagttttcttcattggtattcctggtacgtggactggaatattcttcatcccttgatttgtgggatcgttttgtctttgggccacacttgtcatgggaggaaagtcacagctagactgggtatggaaagaatggaagtgtgtctcctgcagggagagcccaggttattgagacagtcttggcccgtgtttcttgaagaagacgttgggttttgttttgctcattgatggccataccccttgtgtggttggccaggaagctgaacgcttgctcccccttgtggctaaatacaggtggttctgctggcaaacccagtggtcaattactgcatctactaaggattaagaagattataaatgtaaactcagcttgaaactttttgtggcttagaggtaaagcaagaaaataattaagataacaactcacatgctgagggtgtttcatgtgttattattgtggatgttaataacaattttggctctctgtgggaagccatttccttcacttaatcagttggcaaagaaagtacatcagggaagattgttcaccctgagccgagaaagtggagtttcaagtaagaaccctgctccgcatcctgccactgagttgagatcatctatttgatttagctactgataaagtgtttttaattacaaattgtctgcttgcttggggactgacacaaacacttgttttgttttcaaagtgccttctctccccagtgttgggtttggagtagagcaagagtaacacagaggttgcagtcagtgtcttccagcgattttcattttgtttgatatgcggggaacctgatgctgatgaaagggaggaacccaggagctactgactgtgactacagtggatattcacaaaagaaggacctcagtacagttccaagtagtgagaggttgatggattaggacagatttaagtaaaacttaacaggtttaaggtcaaagaaaagtgaagcaacattccagaaggacccagaaaagccgagcaagtcaggcactgagatcttgggattgagaggagttgctggttcagacccagcactgttctggaactttcttttgggtactctttttttgtttcatcgattcctttaaaaggtacaatccagaactgaacatgtcattccacaagtggcccaaccagtgttgtatacactgactggacaggttttgccactaaaatggaataatagtctggttttcctaattccaggaaaggaaaatcaaggaatagatacattttttaaaaaagcatttaaagaatttctcctgtagacattatcttaaacttttggtccctgccattgtatgtgtatcttgaatccaagggtaatacgatacgcagtctggcaaaagcagtcattttaaatgattgagcaatatttagtgactttcaaagagcagagagcacaacttggctaccatagaagctccaccatgatgggcgcagggtttcctctaggctggaagttgtgttctggttatcttgtgagagaaatgcatcctgtgtgatttatgtggattcatttattcttagaggaaatcagacaaaaaccatattgtaaggcccaacccatctaaaaagacaatagaaatgagttctgtgtgtttttcagcagggcctcatgggcaccactcgtaagtccagaatctcttccaagaacaggaagtttctggagggcagtggagaaggggagtgagggctcagctctgtgaggtcgaggtgggtgtgaggaccagcaccagtggggagtgggtttattagctgggaaaggccataaggatgaggaagagaagcttgtgtttgagaggataacagggaggaaaagtcgccgagcccagagtgtgtattcactgcctgtcctttggaggcagccgcttccacctcttttgactgattcttccaactcgtatcctccagtctccaaaacatgattgtggtgcagctgcttgaattttcaaacttgatttccattttagaagttaaggatttgtttttttttccaaccacataccctgtcgctaccacatcaaatacaggtctctcatactgttggtcagctccgttttccgtgttgacctctgatactctgtaaacactcttgacacgtaagctgggtggtttatataccaccattacttttcctgcccagctttgtctttttcttccttgtattttatttgtaaagattccccagctcgtccccagttgtgtcagcctcttttcagtgtgctcagacccattaggtataaggcctatccatgttcctgaggaagtctggcccagagccgtccaggtggtctgacctgggcagggccccgggtctgccatcacccagcccatgctctcctgccgccccactgaagacttccttcacctctcttggacgttagggtttctctttgatggctcctctctttttctgggtttctgatattttctggttgagtggtgctactttcttctaacctatttttatttcattaaataaataggattcactaaatggatttcatacccatgggttgtatgatttgcactttgaaaggcactgggctagatgaccactttgagtgatgctgaggcattgctgggtgacttccttctttccttcttccctcccctcctcctcttccctcccctcctcctcttccctcccctcctcctctttcctcccctcctcctctttcctcatgaagcatgtgcacaggtgcatccctgatgctttgatcaggtatggcctgaaagacaagccattttagttagtttttggatacattacgaagtaatgtgggaagtaagcatcttcacctgtccctcttccctccttggctgagggacagtgtcctagtcagttccatgtgctgtgacagagtaccataggctgggtggcttaaacaaaaaacacttaatgctcacagttttggaggctgggaagtccatgatcaaagtactggcatatctggtctggtggggacctgcttcctggtctgcagatggccgtcaccttgttatatccttacatgatgagagagagagaaagcaagctctgttgtgccttttataagagcactaatttcattcacaagggcgccatcctcatgacctgatcacctcgtaaaggctccaccttccaataccgccatcttggggattaggatttcaacacatgaattttagggggacgcaaacattcagtccctgacagggttaggcactgtgtggctggcaatcaccaggatgcctggagccctgccgggaccacgctggctcatttcagccaccctggatgaatcatccagcctaaggcccatgcctggacattctgggtcctcagtgccttgcctttattttacctgatataatccttcaaacgaaaatgctcgtacttatttttgatcacttaatatacttggccatttaacaatacagattaaacttgtgttattctgttagaaaactgagagattgttttctgtagtctttgactgcatgcatagtctagggctggactggggaggagaggataatttggccacaataggattccttattatctgtctcttccctcccaacccctcccccgacccccgccccatacaggagaccctcagatacatttctgtcagtaccctcagttacatattttgggagacgtaatacttaatgaaccaaaactctgttttgctggcagggaaaaaaattgggctgatacaatcaagataatcctatcaactttaggattattaggaatgttgataatcctatcaacattctatcaactctgtaatcagaaaaatatatttaaaataatgcgtgtttgttaaaaataaccaaacaaaatacagaaaaaagcaaagtaaaaattgacaatcccctaactccagtgttggtagttagggacagaagaagggtggaggatgtcttttgtctgtgttacatgattacagcaaaagtcactcttcattctggtagagccatagaaatctggccgagcagaggcagctgtgcctgaggagcctgacttcgaatcagctgtgttcatctttgctaacctcccaaagggaggaagctcaggaaaccaccgtagaaccccctaaaaggggagggtggctacagctgagcaggtgggggcaggcaggagtggagagaggcgaggatgatgagtcaggcaggtgagatggaggctttgtaggttatgttaaggctcctagacttagcatttcaagcagggatgtgacctgatcagatttatattttgcttgcattgctgatggacattggttcagtgctcattgtactggaagggtcaagaatagaggcagggacccaaatttagggggcttcccagggaatccaggggagaggtgttgtggcctggactagatttggaacatccagaaggggactggagcaatgacatacctatacctagtcccagagggccccgatctagctaaggacagagcgtgcagtcttgcagctgctgggctgatgacatgctggggagtgtatacctgggaaattctggtacagagataaaggaaatgctcaagcctccacctatgaatttgcccggtgattaaaatcatacttcctaagctttatagaagccctctgtttgtcccacaaagggccactagcacaaggaaatacataatgtgttcccttgtcattttataaaaatgtagactggtgctgcctgctgtgaaaatgccagtcaggttgcttccttcatagtaatcggtggattcttttgtccatttctgagtggaggattagccctctgtttgccccacaaagggccaccagcacgaggaaatacatagtgtgtccccttgtcattttataaaaatgtagactggtgctgcctgctgtgaaaatgccaatcaggttgcttcctttatagtaatgagtggattcttttgtccatttctgagtggaggattcctttccataacgtggtgtatttgcagtgtttctctcagaggaggagtgcctttctggtgtcatctgtcctgttggtggcagagttctgctgctgaattaaacctttgtgtcggccttggccactcttatggctctgctggaggtaaagccagtggagtggccttgtggcatttgctccaagttgttgctcatttttctgagattatcagaggccttagagggaagcattgaggatttcattatgctccgataactatcacgttgtcaataatatggttctgataagagtgatgggggatggtggggttttgtgagttgacagacgtgggtttgagacccagctctccagtcagaagccagcgccaggcctgtttctcttctctgagttttagtgtcctcaggtggaggggaggataatattaataacaccttcctgatgtggctccactgggctggccacgccatgggcacccagcacggggtggctgccctggttcgtgttaaccatcagcagggttggagagctccctccttactggtgttggaggtcattacctggcgggggatgtggtagataaagcaccttttattgtccctacacaaggcaactatggggtaacacaatataagttattcagattagagaaaatatgaactcttgctacagtgttactgcagacaggcacatatggtttgttaggatgacatttaaaaaaagtcattttgagttacagaataaaatcaaacaaaattcctttaatcaccagggctgggatggaaataaggcaaaatgttgattcctttgaaagacaatttttgggttttttttgttttttttaaaaaaactttatgtgttgatggtttactctggtctagtcgttcctactcctattctgaaagcaggccttgaattcctgattgtgtacaggattgtgtacaaacaatcaggaattcatcattcatatgaagaagttctgtttttccctctagtgtcatgaatattttcatgtacgtatatgttatgtgactagtgttaagaatgcatgtattatatatgtgcatgcgtctcatttacattgaatgtagctaaaaggaatatttgaaaagtataccttgcctgtctccaatttctacatttcaagttaaaaatgggaaataatcttagaatccatgcctgtggttcataagcctggctcagctcttgcattcccagctactgtctgacgaaactcacaggagctgtgaaaacaacgctgttttgtgaaagccaagtaggagcttagggtcatggcaaacttcagagaaatgtaaaggagcaggcactgtgggttttgtctaccccacccccccgaccccaccgccttccaaaatttctttctttttttttttttttttttttttgagacagagtctcgctctgtcacccaggctggagtgcagtggcgtgatctggggtcactgcaagctccacctcctgggttcacgccattctcctgcctcagcctcccgagtagctgggactacaggcacccgccaccacgcccggctaatttttttttattttttgtagagacgggatttcactgtgttagcccgtacggtctcgatcttttgacatcgtgatccacctgcctcgacctcccaaagtgctgggattacaggcgtgaaccacaccgcgcccagccccaaaatttctaattgaattttaaccttccacttttaagttctgatcctgatttataaaaacctatgtaattttcttcagctttcagaaggaatgtcttgtatcttcctatgggggtgttgggggaactgatattgacagaggtcctctgacatttgatagcctggcaaatagggtcaaacatgttccagacctcagaggattgctgaggatagctttctacttaagctagataaaagaagttttgggaatcttaccttgcactctgttttgtagaaacaactgtgtttaatatatttctcattactggctgaatgacctgtatgtgttcaggagatctctctatttaccattttaatgccacatatttaatgagcattcaggcccagactgtgaagactctggaaatgagaattttgtttcctatctcctgtgctgtaacaaaagcagcttaaaaattgcagtgtatagacctcaccttttatcatttttttttcagatttttaaatattaatattaagggtctttatctcagatgtttgttgtttaccaggtcatcagtatctggacgctggcagggtccttagcaatggagggagggagagggggtccagcctgcatgattggatcagtgttgaacctgtcccacctgtggggaagaggcagcatgcggagcagacaggtgcctgctgcaggtcaggagagctggccccaagtcctgacttggagggaaatggtacatattaatatcctttagtgccaggtactggcgtagctagtttatatgcatcacttgagcccccttgcatcactggcatcacttcaagatagacaacaaggggaatgcacatcatatccctgttcactggcgttcactggtagggaaactgaggcttaataatgtgcccaggtacacacagctgataagtaaccctgcaccctcgatctcacagcatgacattggaatccacctcattagacagagctcagctgcctattctgtcaaaaatgttgagttgtatcagctgcagtgtctgtagtattcctagacatttctgtgattctcataagtatctttgaaagggggccatttagtttatttctgcatttctcccttatctgccgaaatgcccgcaggctctgggacaagctgtaaagctctccgtgttatgctgtgttgcaaacccagtgccagtaatgatgcagtgctatttaaagataagaaagcaagctcacagagggagagcgcagcaggatgtttatgttccagaagcataaacacatgacctgtgcccgtcccgtgttcttcgtccatgtccccagagaggccgtggatgggatggtgcaagaaacccatcaggaagcagaattaatccttcctgcgggtggtccctgtgaagaagacacagcggccggtggtgtgacagcccacagctgtcgaaggaagggagaagagagggaccgagggccagcaatagggttttacagctacgtgctaggttgtctcacatctaggaaagagaatgttcatattatatagaaatgggcattttccctgtggcctgatatgaggtatccagaatattcctttaggtattattaagtcataggtttctgttttgatagaaacagcaggtggttcagttagtatttttgttgttgtaatagtagcttagatctcttgtttttgttttctttggccaagacagaaaacattctgccacacacattacttcatgactctggttatatattgagagcagcattaaaaaaaaaaaaaagtccaatttagtccattaggccattcttgcattggtataaagaaacacctgagactaggtaatttataaagaaaagaagtttaattggttcttggctctgcacgctgtactggatgatacaggatgcatgatgctgacatctgctcggctactggggaggcctcaggaagcttctaatcatggtggaagatgaagggggagcaggcatctcacgtggccagagcaggagcaaggggttgggtcacacacttttaaacaaccagatctcatgagaactcaccattgccagaacagcaccaagccatgagggatccacccccatgacccaaacacttcccaccaagccccacctccaacaccggggattattgtcaacatgagatttcggggacaaacatccacactatgtcgtagccttaaggggatcttacctctttgaagcattgtagagttcagagagtaggacattttgtctactgtattttaaaatactaaatgttctgattatgaaagtcagtcctggaaaaaaaaaacaaacaaacctgaaaccatagatgaagataaggaacaaaataaaaattacccacagtctccctcgcgtgtaccgcacagttcatgttttagtgtgtctacacaccatttaatgcaggtggacagactcaggggcaggtgtgccttgctactgctatgtccacagcacctggcagagtccctggtacagcataactgctcagcagttgggtgctgagtaaatattaatacatgtgcatgtggtaccagtcagggcccaacagagggacctcatgcgaggagttgctccacaggtgtggaggatgaaagaacaagttggggcgaccctgagagagcccagagacaagctctgcaggaagcaggcaccaccactgggccaggtgacctgagcccaggagccaagaggatgccctccactgctgatactacctctgcagtgggacgacatcggaccccactgccgatgctgggacggtgcttcccctccccctgaggctctcctaccagggccccctctcatcaggccccagctggaagccaactggaaagggagtcggggaagtttcatttgtgggggtccaagtgccaagggacagacaagggaagggtggatttgcagctaagaagatagtaaataaccagactacgtgacagtctgaagaatcaaatctggaatcaaattctactctgctctaatgtaaccctgtattttactgtgaataatataccgtgggtatcttccttgcttgatagatacagctccacataatttttctcaatgaaacagattctggagtaggcaacgttttcctcttttgtaaaatacaccaaattgtgaggattgaatgagataatgtcaaagtattagtactttaccctagctgattgacagtatccagtgatagtgataataagggtaattactactctagccaattttatcaaacctatggatgtttaaggaattgggttttttttttttctcctttgatgaatactcctgtaaatacatcgttgcctgcttgtctgagtctttctgtgggtttttagaagtggattacttgcagcaaagtctcctctacttaaggctctttgtatattttgcctaattgtgctctagaaatacatcaatttccagtcctccttctctcagaccacctgtccctcacattttcaccagttctgggtcttgttattctttttactctttgtcagtcaggtgattgaaaaatgtacatttttttaaaattggcatttattagtgagcttgaggatgtttttcacagtcatatggaaacagttctgcttcatgaacaagaccttggggccacatactggcttgttcacctggatgcattttctcagtctccctcagaatcatttttctccctgaaaaatgggattaaaagtattaatagtagtgcccatctcacagagtcattgcgaggattaaagagaggatgcatagatgtattgaatcagtgctgggttctggtagatgttcagctagccctagagattattagccatttgatgtgctgatcctcaggaaggtgggcgggagagacctagacgcagaaaaggagctctggagttgaggtttctagagatgaggtggtgcgtggtggcccagtccagcatggctctgggtgtgagcacaacataggcagatgtgtctggggctcagggagtcatttgtggattgagggtgctatgtgggtgtggaccacggtgatccaggatgatgcaggatttgggccggggaggaagatggcaacccaggttccatgccatctttaaagaggggatggttactagggtgtccagcgaccagccaagtggcctatagataataaggaggactcttcatgacatggaggctgaggtggaaagtcccagagtagggttcagccctggccctaaaaagtgccggagaacctgtagcctcctggaagctgtgctgtgtgcagagccaagcttcagtgtgacaaggaatggtgggagcaatttggagaagaatgaagacttggtgcagtggctagggaggcaggcagggtgaggatgtggaagggtgcagagctgctcaaggtcagcttcctgagcctgcggtgtggtcccttgctccacactcagaagggccctgtgtttgatttaatgctcttttcttgccatcttgaaattcttgatagtttttgaacaagggatccatgttttcattttgcgctgggcctggaaattacgttgctggtgctgaggggatgtgcagagcagaggtgggcagagaactgacgagaaggacacgtgggtaagggtgggatgagctggcctcaggactccgagcagagctcatgtaaaggtgtcgggcccaggatgcgttctcaggctggggtgggaggcctgatgatggcagatttctctggattacaaatagaatatgtagcagggtggttcatagctttgtgtgtctgtgtgtgcattggtaaatttttattttgaaactaaaattatttcaaaattagagaaaggctgtgagagtgcggttgagctggtgttggctctggaacagggtttcccaatgcaggcggcactggtaactatgtgccttgggtcattctttgttgtgggggctgtcctgtgccccatgggatgttccctgcacccctggcctctgccttctagatgctggggggcactttccctggtgtaatattaaaaaaaactctccacgttgccacatttggggggcagaatcaccccctccccaaattgagaagctatgttattggaacacagtgtcctgtattttgtctagcctctgctgcttagagctgcctgagcttggagaagatacttgttctctttccaaagcttcactgtccctttctgtacattgtcaggacggctgttaataccactgctctaaatgtgctcagttttgcataaacatcagctaatgttaaaattttaatctctgctaatataagaggcatcgaagtacacgcgagttcagtttgcatatggtgaggagggagacggcctcatatcgtatgtgtgtatttgccgattctatattttgaggttgattcctgttgtcttttgttcagttgtctcattctgttttcttttggggctttgaatgcccttttcatgcctgtgacctctctttactatgccttttcttctctgccagcaaatctcatccattcttccagggcaccttactgtcccccaaagccccagtgactgctctgtccacagggcttggtttctgtgctctggctctgcaatgcaatgcagaaggggctgggctcggaatggggttgctggtcaggccatgtgcccaggggaaggacacaggactcaaggagtccacccctctctcccccccttttttttttggtcactgaaatattttctttccaattctactagtcctgctagagctgccataacaaaatacccaattggtgacttcaacaacagaaattgattccacactgttcttttttttttttttctttttgagatggagtcttgctctgtctcccaggcaggaatgcagtggtgtgatcttggctcactgcaacctctgtttcccaggtttgagcagttctcctgcctcagcctcccgagtagctgggactacaggcacatgcactgtgtctggctactttttatattttttagtagagatggggtttcaccatgttggtcaggccggtctcgaactcctgacctcaagttatctgcctgcctcagcctcccaaagtgctgggattacagacgtgagccacttcgcctggccatgatcccgcacagttctgaaggccagaagccaagatcaggagaccagtggattgtttctcccgaggcctctgttcttggcttgcaggtggccccttgctgtgccctcacatggcctttgccctgcgtacatccgaagccccagtgtctctctgtgtgtccaaatttcctcttcttagaaggatgccggtcatattggattagggcccacccgtgtgacctcattttaccttaataacctctttcaagtttctgtctccaaatacagtcacattccaggggctagagcctcaacatggaagttttggagggagacacacttctacccataacaccaatgtcatattaagctttatggaagaatagaccaatatgtggtgggttcaagaatcttttcttagaagaaaagtgaatctgtatatttgatactttatgatttccttatttgctctaagcagttggtaagaatctcagtgtcacttggctgaatgatacactactggtgcctccagacctatgaggagcctaatatttttgtcttggttgaaacaatgcaaatcctgggttttggagatgctcacagccagctgtctgattacgtaaactgaaagtggcagagaggaagcttttgcgtggggaaaacatgaaatatacaagggttcctttaaaacagagtgtacttctgaacatttactgaaggtggagggccctggacacctgatgttatcttatgtggcgttatctgggtcagatttcattgcatttcctgaagaggtaacttggcagtcctgggagaggctggaccttggtgtccaggtggcaggttcataagacacctgtgatttgatgtgagccagtcacagaggaagccatttccagagaggaacaaccgtgtagactgctttcctgggagtcaagttaaaacttctctcctgtgaccttgtcacccggcagtggaaagttacccttggctgcagccacgacttccgcatactcttcagaacttgctctgcccttgagttttccagctttcctttaatgcactaaacctttaatattgtattctcctaaatgagacgtctcgcatttgagcaagtaacactcggtaagactttgcttggtgggggaggaggttttaccttcctgtggcattctgaagctctccacatccacccatagtcatgattgtgttatatgacctcaagatgctggagctgttaattcatctttaacataattgacctgattacttctttcttgaaggattttgttcaaacctcagggtttatttaggaacaagtctaaccaggcctgattggttttcctaagtggagatacagctttgggaaacaaattaagaaaatgaatggattgaaaatgtaggaacaccgtgacagttgtgaatttttcttattgagggaaaaaatgggtatctgtgaatatttctcttacactatatagtgagaaatgacactctgctgtggatggtaatttatttctgtgtaattgcctgagtaaggctttctctgatattgaatactgagtagaactcttaggttatttttggaagaattatggattttctcttaggttttagaatattttttgtttgcctgttaagagaatttgatgaagatttcaatgtaattaaccaaataaaatggcattctgtatcctgggaagggacgatgtctttcagttctaaatcaatgcatcatttacctcctatctctcttgctggccgagccatcaatcctgtttttattaaatgttgttgttattgttttgagacggagtttcactcttgttgcctaggctggagtgcaatggcataatctcggcccactgcaacctccgcctcctgggttcaagcaattctcctgcctcagcctcctgagtagctgggactacaggcatgcgccaccacacctgactaattttagtagttacagggtttctccatgttggtcaggctggtctcgagctcccgacctcaggtgatccgcctgccttggcctcccaaagtgctgggattacaggcgtgagccactgcacccggccgttttttgataaattttaaacttctggtttgaaacttttgtttcctgtgcttaaaaggagacagttaaaagcactctgatttggactgacagaatgttttttagatgttagatagatctagctttgaatatttatttgcagagaagtagcagggaggactaggaatgactttttcttaggaggtgctatgcattccatcaggtgactgacccctttgtgagctgtagtggtcagtcccagcatggcccacacttgttggctgtcttagccatggtggctgtggttggcgggtacccagccaagggttttccatactgggggccttggtccagtgggggcgggtcgtaccatgacccccttctcctgtgatcttgcctcactggcccaggtaaattggtggacgtccttgactcctccacctccaaaaggactttgaactttggcactgttgggagtttaggctacacctcaaccaggcagagattgggatctaacctacttttaaaagccctctacagggaatttcataactttcctgagtgttaggttttggtgattaacagccttgactttttggagcccttcctttgccaaacatgcattcctcaggtgctcacttaaaatgattcttcacaatatgcctatagacgggtctgtctggtacagcatcctggagtggtgtcaagggaaagaaacatgctgcttctgccacagacggaccatgcatgggaagaaactatttgagaatggctctccaaggggctggtcggccttgtctgcccactccctctacctttctttgttctgtttctttctcttcagtgttggtccattttccttttttcactgttgcgtgttagcacatcattactcttatctccatatatttggatgtttcctgcattatggtgagcttcagtaggtcttggatgagttagttgttctcattccaaaatgtaaatttctggtgtttagtaggtgctcagtaaagcttgagaaagatgaaagtgagagcccagaactagtataaaaatacggataccaccatagcatggtaattaaaggggtgattgtgaagatgaggtagctgtgcctggatgtgtgtgtgtgtgtgtgtgtgtgtgtgtgtgtgtgtgtgtgttggctggagaaggcttaccagtggtgctggacatgtcgggtagagtgttaatagtaacttaattgactgaatttggaaataatctatggggttagagagcaaggaggtagctgtgtaagaggatggggtcggtgaggtggggtggtgtgagcaatggagctcaagggctcaaggtgcaggcctggactgatggccactaggaccaccccaatggcttcagggtcaggacaggaagggaatgtgattattgcagcaggtagtagggcagtatgagtgtattattcatatatgtgtgatgaaatggagcatcaaataatatatcccataggatagaaaggcacagtgagtgagtttgggttaaaaattcgatgagataaagtggttgtacctcctatgaaaacaatttaatttcttattatgaaggcattactcatgttcttcagaaaaattaaaaaaaaaaactcagtcattatagacaattgtactcaagatgaaaacaccctgtactgtcgcaaccctgaagcacctctgttaatatgtgtgtgtcttctcacggggtgattcttgatcagagttactgaaacagcaaggcttgggaacaagaggcatgagagcaacactcaggacctgttcagttttctgcacagttccaggtgctcttccagcattgctggctccgagagagtcaaatattcagagcttgcaagctggggaggaaaggggttagggtggagataaagatctgggagatctacagatacggatcatctgcatttggaaattttgtttgcccttctcacacatttccatccaagttttctttggggaagaggggatccctgcagaggagtccagttgcaaatgtgaaatcttaaaaatgtatgtaaatagcatctttcattccgtgatacttgtttgtttgaatagaacattgttaaattttattgtgcttcagaatcatctgggtgcttacaaacatagattgctggactctggttctggagattcggattctggaagtctgaagtggggcttgggaatctccatttcttccaagttgccaggtgatgctgatgctggtagtcgggagtccgtactttgagaaccactcttctacctaccaagacttccaaaaaattggtactctgggaagatgccctgtgccagtcctgtggcttcttaggcacctcttccagcatagactcctgcagagaacctggtacctgcaagtacctagtacctgcaagtacctgcaagtccagtgtgggaaatctcatgacaggcatcaacattccgtgacggttgacagccacctatggggtggctgatgccttttctgtgtcttcagggctttaggggaaggagagtctaaatgagtggttctaggttgtgggaagagcctggctttgatgttcagacacctggcctcaggctgcatcgcccatacttcctgtggaatggttatcatgagtcctgttgtcctgtaggtgaatcattgattcctgtctttgcataacctctcacttgatgataatttttttttaaaaaaatgactcttggaaacagaacacacagtttgtaaagggacctacagtacagcagaagctttgtggaaggatacaaaatgtgagggactgtagtcgaagagatttaaattggaagtgggaagagattgactttttttttttttttttttttaaagacagagtcttgccctgtggtccaggctagagtgcagtggcacaatcttggctcactgcaacctccgcctcccaggttccagcggttctcctgcctcagcctcccgagtagctgggattacatgcatgagccaccaggcccagctaatttttctatttttagtagatatggggtttcaccatgttggccaggctggtctcgcaaactcctgacttcaggtgatctgctttgtgtctcttagggagcatgtttgaagagtcaaaggaaaaccaagtctgttagctttgcgaaacgtttttttttttgagatggagtctcgctctgtcccccaggctggagtgccgtggcgcaatctcggctcactgcaagctctgcctcgtgggttcacgctgttctcctgactcagcctcctgagtagctgggagtacaggcgcccgccaccacgcctggcaagtttttctggaatttttagtagagacggggtttcaccatgttagccaggatggtctctatctcctgaccttgtgatctgccctacttggcctccaaaatgctgggattacaggcgtgagtcaccgcacccggcccgaaatattgttaaaaccaagtacctttgtgaaacattgttacaaaaaccaagtaccaagtgtgtggcattaaagtcaaacattaatttcaagttacagaaagaaatagcactgagtagaggttgatcgataaaaaatgaataaaatattcaacagaaactccttaaaaataatgtgagaaatggacatgtgacatgggcgtttaaaaagtctgtaaggccaagaaaagtttcctgaaaggaacactgtgcccaggcagtcctggctttgcaggattccctgataaccgagctcaggcatcctgcagagtgagtactgcccagatagaaccttctgcctctttggggtaaaattcgatttcaaagagagagaactgtggggtgagaaaggaagactgggacccaaggggccaaactagtgacaatgactgctgtcatgaagggtgacaaggacaatacctgctgagctcaaaccaccctttggacccagtgaagctcagatgttgcttccagtgcaggagtagttaagctcaactgttttacaatatccagttatttggctgggtgtgatggctcacacccacactcctagcactttgggaggccaaggtgggtggattgcctgagctcaggagttcgagaccagcctgggcaacatggcaaaaccccatctctactaaaaatacaaaaaattagccagacgtgatggcaggcgcctgtaatcccagctacttgggaggctgaggcacgagaatcgcttgaacccagggaggcggaggttgtagtgatccaagatcatgccgttgcactccagcctgagtgacaagagtgagacttcgtctctaaataaataaataagtagcaaaaacaatccagttattcctcaaatatttatgagcacctcttaatgtttcagatactattgtgacaagagaaaaatgtgtttgtatatgtaaatagaaaaacaaaagtgatgtggaagcgattacttctgtcattttggaactaccttcctcccatattaagtccatattatgacaattcaaaaataatcaaacttcgtaagatattacctgtgaaaggaataagtatttaaaaatgtattttagatggccttttagaaatctagtccgtggacacaatctagcatcatgcagttgccttcaaaaagaatatcctaaagttcttgtttgttttctttttcctttcaaagtgttctgttgaaaataacccatttgtcattttagttttgatatgacttagttatacatgccttttgaagcagtacccacccacatagtaattgcgactatcttgtgttttgaaaaaaaaaaagcgagacaatttgactttgatagttttaagtttaaaaaaaaaaaaaaacgctccaagttagactcagatgaaatcctttgatcttaggtattttatgaggaaactggaaaaaataatttcacaaatttctattttgctttataaaaattttatgattcataacacagggaaaatccagtaagctaaggcgttttttagttgtttatcttgctagtgagtctttgatgtgagttatttctttgcagtaaggtggcatggatgggtgatgaggctaagctgaaaagttaaatctcataatggacatttgcaccctttaaggaagtaaagctctcaaagcatgattatggccaagatgaggccggtggcatgtttgtctcctaaatgtgcagccaggaatctcgacggtttgtctgaggtatgcaggtgcctggtagataaattagggtgagcatcattcatggcgtgtggtcagttgcaggccttcagccacagggatgacagaagggaagtgaggaatcagggatgggtttgaactgcggcgttgctttgggagtctctagacatgatcagttgcacatgtactgttctccttgtcaccctcaggatctactgtcctgtggttgaagcctgcagctctcccaagttggtggcactgggcttcctgacttctcgatgtctaatgagacagtggaattctacttgcagccccactgcaggccaggtttatctctcctctgtcttcccagctggtgatttggtttctcagtgctgttttgggtgcacttttgtggaggattcaagctggtccttagccactccttgaaccagaacctcttttactttcttatgtagttcttctcttcctgtttttatatcctaaaactagtccagcgaccagcccatcgtagtagaagcgttggtgttcttcctaaaaggaattgtaaacatctcttggagagtgggttagccaccataaattgttttgggacttcggatacccccttccgcaaatgctatctagagatgctttaatttcatttcaattggttattgcatccctgatattttgaaactgttatgagtagaaaacattctggtttatgaacaatctgcttttcactatgaaatagatgggaattgtaattattcctgcgctttgtcttagagaagttacatgcatgcatcaagtgttgtgtgatcttgtgcagttcttcttagattgagtttttggctcctcgtgtgcaggccttctaaaatcacaatgtccctgagttgggaaggaacatcaggggctatctggttcattatcctaccccccaccgcctcccacgccccacatttctggcagcctacgagtctttggtccctccccagtgctacctggccagctctcagccttgggaggccacctgcccgtgtttgacctgggttaatgaccgccagttcctttcccttaatacgactcatctgctctcctgcatgctcgctccttgggtgagagctgccctctgcaacctcataacggaaaatggcttgacttctgccacctcctcctccttcccatgaaagaatctggtcttttctatctctctattatttttaaaaccagattaggttggttgtggtggctcacacctgtaaaaatcccagcaccttgggaggcagaggtgggcagatctcttgagccccaggagtttgagaccaacttgggcaacatggggaaatctctaccaaaaaaatacaggaaaaaaaaaaaaatagctgggtatggtagcacacacctgtagtcccagctacttgggaggctaaggtgggaggattgcttgagcctgggaggtcaaagctgcagtgagccttaatcactccagtgcactccagccggggcaacagctagaccttgtctcaaaaaaaaaaaaaaaagaaaaataagaaaaagaaaccagattaaacattcctaagtaattctttttgtgacttttgcctgtttattaactatcctggctacttaaaatgaatttttgagttatgaatacatttagatggttttaaattcaaagaagtctcttttttctcagtcacttccatccccagccaaacagttcttatccccagagtcagccagtgttaccagtttcttgtgtccatgcagtttgctttatgcatttacgtaagcaaatattcgtacacacacacacagcctttctatcttatggaaagttatttcagtggcacatgtaagtatctcagcatctcttgattgtcattctttttggattttttttttaaatttcatacttacaaatgatcatgtatcttaagttttctgaagtagccttggtttcgcattttgactgtatttattatggtatcaggttccatatttcttaaaagtaatactgctgctgcacttacattgaacaagtcaccaagctctgttaattttgcctgaaaaatgccactgctttgacatgatagaaaacacaggcaatagtctttatttctcactgctgtttttttcttattttgaagaatcaccctaatacataggaaaatctcgacttagcaaagagataaatgagactgtaattattgcattgggtttttcacaatgtatgttagttatctattgctacataacaaattagttttagagttagcagcttataaagcaacagatatttattatctcacagtttctgtgggtcagtaaatcaaaagtggcttaactgggtggttctgacatgtgcctttccacagtgactggtatgtagcaggcaagggtctcttatgatcctgagtgaggatgtcagccaaggctgctgtcatctgaaggcttgactggaacagaaggacccatttctaaaatgagtcactcacatggctggaggcaagaggcctcagttccttatcgcagagattgctccttggggctgactgagtgtctgcacatcatagcaacagctggctttccccagagggaatgatccaaaagagaggtggaagcctaatgtctttgtgacctaatctccaaagtcacacactgtcacctcttccatattctattagaaaggagtcactaaatcagatacccatgggaaattacccacctcatgaagaaagaaatatcgagaatttgtggacctgtttcacaaccacacagcatcattttttgaaggtagagtcaccttgagcatttaaattagggttctgctctagaagtctatccctttattttttcccatttgttaaccctttttctacttggcataatagcagccattacccagtagaagttgagagatttaggttgcacagaatcccacagtcttttcagaaactcatatccttagggtgtctgcttgttgacagcattgtagaattgaaacttgaccacgtgttatgtgttgggctgccagtggtgatcagagatgacggtgagtagtccgttgagttagggctgtttgcctctgtcggtgtcatctgggtttgaactggacttgcagtcctggtgggctgctttcatttccaccctgggtctttgttctcaccactcacatcttacgcctctgttccaccgctgtgtaagaggcaactgtgcacacaccttgcctctgccattgactgtaagctcctgagagagagagagaatgtgtctggttcagttttgtggccctcctttttgctagcataatgcattgaacatagtatcattctgcatttttgttgagtgtataattagatggtcaatgtggagaactcagagggattttaggagggggtggcagcaatataaggttgtgggacccaacattaagagagggaaaggtgtagcgggaaggcgttggtgtggggagggagaaagtcaagaggattcaacctggcaagagttggaagtgacaggaaggtgtgtggggtggggacgcaataggacagtgtgtgagattttttaaaaaatgcaggcaggggagggatgagtaggcagagcaccgaggatttttaggacagtggaaatgctctgtatgatactataatgggggatacatgtcattatacatttgtccaaactcaaggagtgtacaacaccaagagtgagccctaaggtaaacgatgggcttcgggtgatttcgatgtgtgaattgtaacagggatactactctggagcaggatgttgatcatgggggaggctgtgagtgtgtcgcggtagggggtacgtaggaaatctccgtgccttctgctcaattttgctgtgaccctaaaactgctctaaaaagagtagtcttaaaaatgcatgaaataggatcctgtctcaggactggggcaagagcaggtagaaatggaaagagtgactgtggctgctgtgtagcaggcacacaatggtcatggtccatatgctggcttagttattttttaaagcaactaaagttaagtaatgtatacttaacttacatatttatgtggtccaaaaaacgttggtcatctgttttaatgcagagagtgtttaccctaagcctgcaaatgtgatgggtaatagctagaactagaaaagtactttagaatatggaaggtaaatacatgaattaatttaggtaagagtgacaaaacaggggaagtccctgacttagaacttattgtccgcttggacagctggtgtacgtgatcctggggtcacagtggctccctgtgcaggaagaacactatttcccagctcagataccatctttttaggagagtacctgccattgtggaaaataaggataaaggataacaagttacctccttaagacaaagtcataggagaaatggtaaattccagtatcttgagttttgagttggaacttgaaatttattttactacaagaacactgttgatggattatgtattttatagactttgtgggtggctatgggactctagtaactgcttatgcacagtttatatgagtagggctgctggatttccagatgacgctctcgcaactgaaccttcagattaccacctgtttctcagtttggacactattagtgtgctgctgtcacttatggctcgggcaccttatcttgttttatgtcttgatgaagaagtacaaaattcagtgtaaaagaaaaacatatgtaaagcttatagaatcaccccgttacacaataacaatgcagaacaatagattaataacaggaagagatgctgaaacttctcttcagcctagtttctactctgatgtttcttctctgcattgtacagccaatctatgaataatattttcattgtctaagcaaagccaccttagctaaatatttaattctactggagtcataaacagggttcaaaatatcacacatagattttatgaaagtaataaaatgcttcagaaagtacagtggctcagcctggggccactgcatctgataatttggttacacaccttgtcatgtgcttcctaaaagaatgacgatggttgcttatctgtgtttaagcttgtcattttgaggaaacaaagataagacatttttgctgtgtctctaaaatgcatgtgtaaactatttttatagagtaatgcttcagagaggagtaaaatttcctgcaacaggtgcttgtaaacagtaattgctcagtaaaggtcacctcccagctgttgcctacatgttacataagagaaccccttcacgtcttccgtatttgcagctctgtacctttgtgagtcacctaaaaaataactcatagggttgtttttctttctttcttttttttttctttgagacagggtctcactctgtcgcccaggctggagtgcaatggtgcgatcccggctcactgcaacctccgcctcctgggttcaagcgattctcctgcctccattctcctgcctcagcctcctgagtagctgggactactggcatgcatcagcacgtccagctagttttatatttttagtagagacagggttttcaccatgttggtcaggctggtcttgaactcctgacctcaagtgatccacccatcttggcctcccaaagtgctgggattacaggcatgagccaccgtacccggcaggtttgtttttcttatgacaaaatcaagcctggatggtgtcgttaacggtgaagttaaaatttttcttttgctttccttaatatttccgtgtttttttctttttctttttttttttttttaacaaaagtctggtttctaaaccaaaatatttaatgcttcaaaaggaaaaaaatgtaagtcagtccaaagaaatgattcattttgcagaggtaattactactaacatcaacctttccaggtctttttctatgcagctatatcattgacatttttttaaaaatgagattacattgtactggagggtagactgctataacaacttttggttttggatgggaataaacagaaaaagtctcatctccagttcatttctggggagggtcaggaggtggggggtgcttggctctactcccttcgtatgattttcccttctttatctccaggatcttccccatttcacggagagacatggatgagaatgaaggctgctgagtgggaggggcttatggggccagttttgaagaggcctcataccttttggccacattccattggccagaactttgtcatatgactgcacctaactacaaggaagactgggaaatgtagtcaagttgcatgtccgggtagaaaagggacacttttctgtggaatagctagcatgtttgtaactcaattttataaaccattttgaaacttttcttaaaaaaagcttatttcagacacatttttatatgctggatctgctcacctctccatctctatcttattaaaagttcttgccagaatctctctccaattgttctccctccttctgccctgttccctcacagcagccacagtggttctttcaaagactgaagctacattttatcactcgcctgcttaaaactttacagtgcttctcccccagtggtcgggataatgttcaccctctcctgaagctggcctctgtggtccttgaccccatcaggtcccacggtgccctgcatggactctgccatccttcaccagcttccccccatcaaacggggcttgctgtcagctcttcctgcaactcccagccctgccgcaccactcagccttcttccttcaggcttcagctccagtgtcttttcgccaaagaagcctttcctgatctctcagccataaatgttcctctccccagttgctttttccctctccctctactcagttgctttatttaactgtcatattgtctttggagcacttgccaccatcagaaattatcttgcattatgtatttatagtctgtcttccgcctactagatggtgggttgcttgaggcaggaactctgtcttgtttacatctctatctccagataacgtgtctggcacgtgatgggtactcagtaaatacttgtggaataaagaaatgtcattacaggttctctatgcattaaaattttttagaaatggggtgttgcagccgggcgcagtggctcacgcctgtaatcccagcactttgggagactgaggctggtgtatcacctgaggtcaggagttcaagaccagcctgggcaacatggtgaaaccccatctctactaaaaattcaaaaattagctgggcatggtggcacacacctgtaatctcagctacttgggaggctgacgcagaagaatcacttgaacctgggaggcagaggttgcagtgagctgagatcccgccactgcactccaccttgggtgatagagtaagactctgtctcaaaaaaaagaaaaaaaaaaaaagaaatggggtgttgctatgttgcccaggctagagtgcagtagctttccacaggcttgatcgtagcgcactgcagccttgagctcctggactcaagtgatcctcctgcttcagcacctccccgagtaagtggtactataggtacttcaggttttgaagcatgtgtaaaaaatactctagcagggacatcatttgagctgagcaggccatggaggcatcaaatgattagcagtagggtacaacttgttgtgagaaccagaaaagagccttggcctacataacatcctgtgctaaagaaagaaccctgactcccagcctgtgagtgttccagagatgggcagagcagtccctgcagcgcttcagggaacagggaagagcagctaacccctgatgcttctgtaagcactttgggacgccctttgctatagtagggtattgtcttagttatccctgacttgcctggtgttactttacatcccttaatcctttcatgaagactggcaaacacattcagtcctgccaaccttgaaagtaggccatgtttgaaagaacattggcacaaacgagttgcgaacatcttctttaccatattcatgttctttaccgtattatgaggacactgtgcttgccacatgggcagtcttgttttggggatacgtggttggatggacggttgggtggatggaagactcctggaatgtgaagtatctcaaggatgtgtgtccattgcatgaatgtatgtttgatctatgcagctaattgacaaagatccaccatcctgtaccctccatgttttatttttgccctgccattgttctcttcgacattctataatcatcaaggttttcttgccctcacctaggtcttgactaaacatgttgggtaaatgaatttcatattactactttcttgcgccgtcagccattgtgttcttggggactccatcctgagccttttttttttttttgagaccgagtctcaaaaacagtgaaggcaggtgactggtgaggagagttccagccactggattctccctcagtcccctgtgctgtggcccttggtgacccctagatttcagtgcccctgcctgacactggagtccctctgtaaagaagcccctttctagctagctagctgttccatcccgcacacccccacagaagccttttgctgccattagtaagcacgcctctattttctcacctgtgattgatcatgcatgattgagttttgtctattaaagcaattgataagttactaaaatggcaccaaaagaaattagaaaaaaattgttgcaaatgtcagtgaaatcttttaaaaaactgttgtactttagaagtgcctcaagtgactaatggaggcttaggactctgagtggtgtcacaaggaaccttatgcacagggacactgacattagcctgtactgtcacccaggctggagtgcagtggtgtgatcttggctcactgaaagccccacctcccaggttcagcaattctcctgcctcagcctcctgagtagctgggattataggcacatgccaccatgtctggctaaattttgtatttttagtagagacagggtttcaccatgttggccaggctggtctcgaactcctgtcctcgtgatcggcctgcctcggcctcccaaagtgctgggattacaggcataagccaccatgcctggcccctgggccattttttattcttactcttaggctaggtttctgcagaccttggttataactgcaggctctacattgataactgctgagtctctaagtcagaccagacgtttctccccatttagtgatacatgttttccatccaattgcttcatagacaccttggacacagtgctctatttcaatttatgttgacagttcatgacccaaactggaaacctgagttatcctggacttctgcctaccaccttctcctaagccatctcacctgtcctaaatgtcgtagcccttatctagttctctaagctgtcatagggtcctgtactgctgggctgcttgttgccttcaatagagcctggagcatattcatgtcggtatttcaaggccccgggcataagagcttcttaggaaatattggaatgaatgaagaaatgatgaataaatgaacaaatgaacagttgattgatttccaagacactttggggtggtttccatttagaatggtttttatttctttttactggaactaaggaattatttttgcttgttgatgccaacattttaaaagcactataattttgaaatgttttaccacattaaattcttttctattgcaggtcacatacaaatatgtcaacttcaaaggaggaattatttgttatatttatgcaaacttgtggcacttggacatttatctagatggttttttgtgtatgattgtgttcttggtacagctggaaaagctaactttaagtggcaggagtaattgatcttaatgacttactttgaattaaacttgtgcttaattaacttggatgttctaagtttctagagtcacagacttttagagctggaatattgctttttgaacttcagtgtaaggaagaattgcttatgcttgaattgatttgttctgtatcccaatactggactgagtagaaatcaattactttaatattggatgagagagtgattgattgaagatcaggtttttaacctctttttttgttctccttctcacagggagagtcccgtattctcagagtaaaagttgtttctggaattgatctcgccaaaaaggacatctttggagccaggtatgttggctttgtttttatttctgtggacttctgaaaaattgacaagcagttttcaaattcaggcacgcatcagaatcacctggaggacttcttaagacaaagctggctgggccccacctgcagggattctgatttaggaagtgatgctggcccagctggttccaggagcacattttgcacagggcttctggacttaccatcacaacagtagttaacagcctgttcttcacatgggctaatttcatgagattagcttctggtgttgtattctcagtagaaaaatacagtgtgggactatggctctgcttattttaatacttcaaaaatatttcaaacttagggaaacataaaagtgtcattttgtttctaggagaactggatattctggacatgtataatctgaattaagagatttggtgatttggggcgaatgtggtgatttctgtggcatttctagaagtaccagcagggaagcagccagatctttctgtgtgtttcagcttttttattttcagtattgcacttggatattcctgtatctttaaatcagcccttttgttcctattggctgtcagcaatgtgttgcatgaagttattggactgggagcagggtgagggtagccgtagagccacctggcactagaatttagccagattttggagaccaaagatcttttgaactttaaacctggaatggacatgagtgatgttctagtccaacttttccattttatggttgacaaagcttgaatccagaaaggttaaactacccgtgcaggtcacgtgggccagtgatgtttgaggagtgacaggaacactcctcctgcctctacccagtacattttcctttgtggcatggtggcctgaaaatactgtgaggtttaacaatgaaggcaggtgactggtgaggagagttccagccactggattctccctcagtcccctgtgctgtggcccttggtgacccctagatttcagtgcccctgcctgacactggagtccctctataaagaagcccctttctagctagctagctgttccatcccgcacacccccacagaagccttttgctgccattagtaagcacgcctctattttctcacctgtgattgatcatgcatgattgagttttgtctattaaagcaattgttaagttactaaaatggcaccaaaagaaattagaaaaaaattgttgcaaatgtcagtgaaatcttttaaaaaactgttgtacttagaagtgcctcaagtgactaatggaggcttaggactctgaatggtgtcacaaggaaccttatgcacagggacactgacatcagcctgtactgctggtaatgtcagagtgaagcaaatcccacctgaaggcactctcttgcttgaccgtgaagtcacactgagtggttcaccatgtgcctgcactcatgcaaggataagccaggtctctaggcatgggcagaaggatccctgcttcccttctcttccctttcagagcaacactttcagccatttccatgagtctgggctcttgttacccagctgaaatactgtttcctgaaactcacaaatttgctctctaccaaagcccaccttatgccctgcctttccatgaagcctgtcaagaaaattccaagaaagaaaatttgatattcctatatcaaagcgtgtgtctttcctctcctaatacctcttagctgccacagtaggtgcaatgtcattttagcttttgcagatgcattacctggtggtttcctagtatttctttcacttgcctcgattgctagattagaaatttactggggacagacatctttttaatatctttctcctactacttaacatatagagcatcaagggaaaaaaaaacaaaaattatcttttaaaaatgtaaacatttgcatgccaaccggtagtggattgtgcccttaggttaaaaatatgtattctcactctttccaatgaaatctgtagtgctgaaggagcaagttggatttagaaaattttggtgatttctttttaagcttgattgggtttttattttgttttatccaaaccctcccattaaaaaaaaaaattgattcacattgtatttctaagccagttaagtagatttaaggttgaatttgtagtggaattaggctccaaatcttagaagagcaaattcgtaccttgaatttttactgtttagataataacaggcagggtcatttctaagggacatggtggaaaggaatattcgtgatattaattagaaagataaatcgtattgtggccaagtggaccaagtgccagaaaatgcatcagaaactctgaatcctgcttctggtcttcattttcctagattgataagtaggcgcacacattcctgctttcctccctcctctgaagtgctgtagttcttcagggacacatttgccagtgggtctgagatgcaagtgtgaggtggcagtgtgggttaatgccatcttggtgtctcactctggagtggcactgcttattgccttaaaattttgccagatgacctgcattctccctccatgctatcttgggcaaatcccttaaaaccactcatgccactgtgtattagtgtacaacaaggataacagtttctttgtaactggcatgtggggaagaaccgcaaagtgacttctgtcggcagcagctctgtcgtgttttaaggtagtagtcaccgggcagaggtttggtagtgtcctctctggcagccaccgtctccttcagagccctgggccactgacatgccttttctccaagtctcttccctgagtattccccgcacctctgtgcctgatcagacacctcattctcccttggcagcaagaaggccgggtaggcattggagcccttgctgtagacaggataatgggtgaaagaggaagaacattttcatgagaggcatttcagagcctttaaagtggtagaaatcctgtagacaatgatgtttttaaaatcagggatttgcatctctgggactccaactcctttgtttccaagggaggttccctgggccacttggcctgaggttgggaaggggtcggtggttgcggggcagaatgtgatgcttggggatgcaggatggtcaggggcgggtgacggtgggaggagtggagcacgtcatctctccttgcccttccgaggtggtgatggaagctgcctacagctccagctcagaggccgggggtttctggggcccttggtgtggggcctctctcctagctggaggtggccccttcccccttgagaggcctgtgcctgaaatgcccttgtccttttcggccgtctcggccccagtccagtacttaggatccaagatcattttcagctccttccagccaagtctcactttattaaaggagctttgttcggagcagattggataaccgagccgtgactccacttgaacatctgagcagttggcccgcgtgggaaacagcaatggcagagaaagatgcttccctttggatcataccttgaggacaaaaaagggcagtcatataatctgtcatctaaactgggacgcttttgtctggaatgaatgcgacattgaatgggacgtccggacataagatgtaaattgagactgcagtcaccctaggtcagagacatccagcctttattatccatatcatggggaaaaaaaaatggaatgtgattttttttccccaaaacagcttaaaaaaaaatgctaagtaaaagaaaaaaataaaaagcaccttttaaaaaagcaggcctcacataaaatgccactaagacatcaaaagagaagtaaaaccctgctcaaaacgcccacgtggggcggccacagctcacccttgtgtgcctgtgtcccgtttctgctgtcccctttcccaaggacgtactctgccctaacctcaccctgatctggtgactcctccagtggcccatcctatgttcaccagctgggtcctcatctcctccgccacacaggctgctgctctgtcccccagcagacctctccctgtctctggggtgcccatgacccctgggaagtgctgtgcatagttctgtgagtgaggttgacttgttgttttatgcttagaattgtttctttctcctgaaattagatttttctcctctgatgactaggattctattttatttatttatttttattttccacgacctattatagcacatagcacctaacaggtcctcaggaagtatttaccaacagattgcatgaagtgagcccgttcttcctccctctctccttccctccctttcccaccccttcactggaaactcacagtcactaaatatgccatgaagttgctgccttttgcctttgcctgtgttttcccctctgcctggcatctgctcacatcctttctggcagctgccctctcatctgtcagggcccagtttgggtggcaacactcctgctgaggcccctgcccgcctcatcaccccagcccaagaggacagaacactgctgcccgcctcatcaccccagcccaagaggacagaacactgctgcccgcctcatcaccccagcccaagaggacagaacactgctgcccgcctcatcaccccagcccaagaggacagaacactgctgcccgcctcatcaccccagcccaagaggacagaacactgctgcccgcctcatcaccccagcccaagaggacagaacactgctgcccgcctcatcaccccagcccaagaggacagaacactgctgcccgcctcatcaccccagcccaagaggacagaacactgctgcccgcctcatcaccccagcccaagaggacagaacactgctgcccgcctcatcaccccagcccaagaggacagaacactgctgcccgcctcatcaccccagcccaagaggacagaacactgctgcccgcctcatcaccccagcccaagaggacagaacactgctgcccgcctcatcaccccagcccaagaggacagaacactgctgcccgcctcatcaccccagcccaagaggacagaacactgctgcccgcctcatcaccccagcccaaggggacagaacactgctgcccgcctcatcaccccagcccaagaggacagaacactgctgcccgcctcatcaccccagcccaaggggacaggacactgctgcccgcctcatcaccccagcccaaggggacaggacactgctgcccgcctcatcaccccagcccaagaggacaggacactgctgcccgcctcatcaccccagcccaagaggacagaacactgctgcccacctcatcaccccagcccaaggggacagaacactgctgctcctggggctgtagtgggtgtacaagttccctcctcctacggccccttgtcttagcggacttgggaggctcagaggctccagccctgtcttattggtgtttgcaggtccagaaatcttggcacatgacagttgcctggtaaactgccttgaattcattgagtggaacacaatatggtgtgctgtggcacctgatggccagcctggaggaaggggtacttttttctcattgtcatggaggtcccattggctcttcaagcatctctcccaagcatctaggagaggtgcttatttctcattctcacaaaggctctttgtggaccagcacaggaggcctgcctagggcttggatgaaaaatgagcatagagagaagaggttaagggaagcaagctcaagagtgggctcagagaaaagaatctgggggagtcaatgagatggcaggcaaggaacagtctccatttgatgctgatgtttgtgcagaatgactactttataccgtacagaaggagcacacgctcttcttgtggtaggtcccagaaacttctacttgggggtacatgaggcccagctgggattgggcacagaaggtcatggctctgcacctgaccctcaccttaggggtcaggagagagccaaggacacgagtgatgggttagggaggactcaggcaccatggaatactgtggccatccttccatagaggagaggtacaggtggcaaggcaggcaccaggcagccgccgacagggtcaggaaccaaggcaggtccaggaaacagaggccaaaacagcagcaggaacctcaggcttagcagaccactgactcttctggaagtcttttagacgctctgtggtggggcagggacaagtccttggtgtttggccatggtgaagtgtgcagttagggtaggtgagtcgtgctttcttaacacgggggtaaggaaggagggtagagtttcagcagctcctgtttcttgagcacttgctatgtgccagatgtggtttgaactgtttacatgggagctcgttgggtcctcccagcaaagtcctatgtagcaggcactgttgttctttttgcagataaagaaactgaggcaagaaaggtttagtaagttgtagagctaggtattgaaccagggcctaacctcttaacagaagttagttagaggctgttacttgagtgctcacaggttggctggcaatgtgtttggaacccaatgtaatgtcattagattctgcctaaatcttgtgaagaggggatttccatttgataggtaagaaaattgagaagttatcatcagcccgagatcaaacaagggtatagggagtggtgggacctattaagttcagatttatgtgacttctgatgctatgctcagtgatagatctcttcttgaggataaaagtttgagaattagggttcctcgaaaaccctgagatttctttttttgaggggtacctttttgtgttagcagatttaaagagctggccattgtatttgatggtagctgagtaagccttttgaattggagtatcatcaactattactagatttagaataggtatattttgctaagtaagatcttaaagtttttcctttaaacttaggatagctgttcaaatttcaaactcttcttttttcagtaagctggagacatttaaccttttgtcataggcttaaagcagtcattaaacagggtcatttcaatgcaactttttaaacctaactcccctccctttttctctttaattatgatcagtggcttcatttgagcttacctaggatgcatttgagactataaagctgctttcttaaaacttagcaatgttggctgagacaaaccaactgtagaatctcatgctttcataaagaaggttgcaagacattcattcacagttgctcctttattgtgtgtgatgagccattggcatcaaacctgcttgggttgctatcagtttttcttttgagagctggtgacttgcaatttaaaacacacatgggctcaagggtattggagggacatggcagaaagtccttctgctgcctagtgattgagagtgatggggtcctaactctgtgtgaggatagctctttgacacagctcacctcagtcccctttacctaggtttaagttgttagcattttgctgtatttgctccatctctttttttccctgaagtattcagaagtgaattacagacatcatgacgtttagttcctaaatacttcagcccaaacctctaaaaaacaagaacatatttctatataactgtagtactgttctcacaaaattaagactaattgcctaatggactctattacctgatccattatctgaacttccccagctgaccttaaaatgccttttacagctggactgtttaaaccaggattcaattgagaattctgtattgcatttaatcggtgggtctattaagactctcttaacctagaatagtgataaaagctttttactcttggtctctttgcaaactggggacccccagccagcaacaccccacctgggtctcactctaccatgctggggtgccctagctcacctgtgttatagcttgtacctgtgttcagtggttcccgagttcttgcatggcacccaagaagaatgaggatatgctggacattgagggtgaggagggcagagtagaattttactgagcaatggaatagctctcggtggagaggggctgcagtcaggtgcttctctccttcccgtgtggctgggcccagggctttttatgggctcagaataggggaggggcaggctgcaggtagtattggaaaaggcaacatttgattcattaaaaggcattgttcagaaagaatcaatcaggaaagggtgggcagacaggaacagaagttctcgctctggttcgtgggtttcatccgggaccagcagtccagtctttcagccttcaggctgtttttggctcgaaggtggggtttcaccggggacccgcccctatctgcccaggcgtttggctgcttcctatcactatcaatagtccctccccttcaatgacttgtaggaaggttgtttcgcttaccacattccatcgtgtcctggtggcatcatcaatgaatgaacatgttcttttccccatgtttcttgtacgtactgtgtattagaagttggactaaaggcttgatcaaatttgaggcaggaatgggtgaggctacgtgcgactggagggacacaatgactggttctgtcataatcagtgattgaaattgatccctgggtaaatgtgggggcagtctcatccctccactatcaaaaattaacattttttttccccaggtgaccagcaagtaacgaggggaggggctgttttggtactgtatacctgcaaattttaaatattgatttactttacttccaaaggattggaaattttgtttttttctttctttgcccttctttgaaaacattgtacaaagtaaatctccttattttactaatggagaagcttctgaaagaggctgaacatacattgaagtacctttgctcagctgtaagcccttctggatcagaggtcagaccaaagtttgcagacagttggtccctgtggaccagactgaatccacacatgagtttatttggcctgtggagcactgaaacaaaaaaatgcaaatcctgagccaacgtttgggagatcccatattataatacaaatcgagatttccaggtttctggaaggtcttggcaatctagccacactgggcctgcatctgtgcaaggctgcatggctagaggtgtgtgctgggcacacccattaggtgggactgcgcctttctggccactagggaccgtacacctcctgttgttttcatgggggctggtttcccttgctgacacgtggccatgaggtccctcgaggtacaggccggcatttggacttgtcctctgcactgtttctttgttagcatttagaactgacttctcctcttcctcccccattgaggagcagcaccttactctgtgcagagtctgtctgtgatctgcaggctctttgcagagctacatttctctttggaggccttgctgagcagcctccgctgtctagggcattgctgagaatcacaacatcaacactaatggcccttgggccaaaaagtgtttgtcttaaaatccctgcaccaaatagcttgtgcaattactcctgtgagagccccagaggatctaactcttaggctgtttgttctagctgtattccttcccaccccccaaaccgaaatgacattaaaggatagtaactccctcccgcaaatatagataaaaacctctttactccctaacaaccacacaactatttacatttttgtgtttacctcctagtctttaagtatatgaatgcatgcaacgtcctttaaaaatatgtcaatcctagcctccacaccacccagccgaccaggtttcccagagggaagcattggaaatggcagatgggtaaatgcacagagctggcaaatctccatcctgcgggaggcttgctgtgcaatatagccatcgccacaataatggatcttcctaatgatccggaatcactgagcaaagactgtgccatgttcagtatacactaagtgagcatgcagggaatatatgatcagtttacaaacatttccacataagcttttttctctctcccactccagttttggtaaataaaagagcaaactagactgctttctttctctctctcactctccccctgtctccctccctcttcctctctgtccctgtccctctctcctgcctccctcattcactctgtcgtcctgtctctctcctcctcctccttccttccttgcttcatttcccccctcatctctttcttcctcaccctttttaaaaagagacaggagtcttgctctgttgcacaggttagagtgcaggggtgcaatcatagctcactgtaacctcaaactcctgagctcaagcagtcctcctgcctcagcctccccagtagctgggagtacaggcacactaccatgcccagctaatttttaaaaatctttatagaggtgttgtcttgctgtgttgcccaggtgggtctcaaactcctgacctcaagtgaccctcccgccttggcctctcaaagtgctggaattacaggtgcaaaccactgtgtccagccagacaggtcacttttctgtaccattccctgatgttgtgagattagtgagagtccctactgtggaaccttgttcacgttgccctgactcctgatgcatggatatttgctgttaccaaagacacctctgctttaccaaatgttttgacagagtggaaggaaaactacaagacttcttgccctcgttttcttcagtctagaatgatgctggggtcactgagtctgtagggcagagaatctgatgtgttttttaggaagcggaaggtgtctgacacatagatgtttgacaaattttgttaatctggtcagagtgcagcctagaaaattaaattaaaaagctgctgaggagtgctggggtcgcattttgacatagatacaaaggcaccaatagggccaaaagtatgaggccagtcctagggctggtgaagtttggatcccctgcctgacattgtgtcctgagcccctggccccttcctgcacctctccctgagccgccggcccctcctcattccttcctctcctttatcttccgctgtctttgcctgtgcccccacgcccgtgccctgaatctggagtctttgtcttagtgcattctgtttgtctcactgtcttcctctgttttccttttcttgcggggaggaagggtagaaagagtgtaagaagctcaagtatgaggaagggaaggttgccaacttgagatgagtcagaaatgaaagcagttctgaatgtgtaagacaatgaggaaaatatttatttaacaaaaattgaactaccaaccaagccttcaggaacacagccagaaggtgctgtgtagggagaggtgtgcattaggatgctggagcgtggctgccggcatccccaccccaggaggaagggactcgtttctctgaaccttgttaatggttctccccattgtagacaggactggctctccaccccatcctcagtgggtgcagctttggggaggccgtgaggctggtgatcttggggcctcctatgcatctgtgttattgaaggtaacaatgtcccttctacccaaaagtcatgcttttaaaaacgcacaatcttgaatccatttgggaaacatctttggaactccagaatgttgtctttctcagatatgtattgccaatgttgtattacttcatttgctaagaaacattgtcatcgactttataaaattattgaataattctatttgggggagaagcctggaagctaagattttaaaggttatttataagttaagtgaactggcaaattcttaaatggtaaataaaacctttcctacatgctataggtagttatctaaatcagggcctaacaagcttttttatttattttcctgtaaaaagccagatattaagtagttgaggctttgcaggactgatggtctctgacatagcactaaagcagccttgggcaatacataaacaaaggggcatgtgtgtgagctgatggtccacgggctgcagtctgccaacctctgatgttataagccattgattttctacaacatatatatttagaactgggagtgtcagtgttattttgtcatggtttccagattaaactctttcatattgctgctggtcggtcaatgacagactaattctgctagcattgactttctgggccagggaatggggttcctagatagtgcagtagctttttatttattttcttttccattcaagggtaacatgcttaaaatacagcgtatgaagcttttggatatccactgtaaattttaaggtctaaaaatgaatgcaattgtgaaatgtttttgccttagagaaaacgctctcactgctttgtgttataaatgcatgaaaaataatgatgaattaaatgcatacaaacagatgcagacataatttagatgagtgtattgcaattaaaatattgcccactttcgctacggaatattcgttggacttatgaccttagtgtaagtaatgtttaataaggaatctgcaatgtgtaactcctccgtaaattattaaaaggattggcattcctactgtataatatcaacacaagggatagaaaatatgcctggattcttaatgaatgtgtgctaacgttccttctggcataggaatgtgtagtaaatacacttcaagggttgttcgcatttttatccgtcattgttataggcatgttattgtgtgtctcctattgaagaactgattgatcattgttttaagcttctgtgacttttagatgcttaaaactaggcgttcatggtaggaaagtagagaaacatgtggaagaaatactgcgtttcaagtttgggagtggctggtagaaaaatcaaactaggctagtcttatagctttatcgcagttttgttttttttcctagtaggaaaatgatagtattggttgtatattaaaacactctctctgacactgacttgaatcacgtgcgagttcattgagaacagggattttaacttggttaggtgattttaaacattatttagcaaatctggaaaacaaaagagaaattttcaaatatctttcttccacggtggtgtactggctctctggagtgtgatttcatcttctcttattattgcatatgtagtcaagccatcatgttcttgaagtgagacttcaaccactagtggggccgtataattcaggatcttttgtttgtccttacgtagtttcttggcctggaatgtcaaaatatcagaaactgttctttctctggaatcatctgtctccgtgatggcctcgccatctgtacagtcatccaagctagggaccaaagagtcgtcctttactctctcatccttccggctgctgtgtctggctttcagtgtttgtgtagagcaggggtctccaactcctgtggcgtgttaggaagtgggccgcacagcaggaggtgagccatgggtaggcgggcaaaacttcctctatttacagctgctccccatcattcgcattgctgcctgagctccgctgcctctcggatcagccaccagcattagattctcataggaccatgaaccctattgtggaactttgcatgtgagggatctaggttgcacactccttatgagaatctaacgcctgatgatccgtcactgtcccccatcacccctagatgggaccatctagttgcaggaaaacaagctcggggctcctactgattctatattatgaagagttgtataattatttcatcatctattacaatgtaataataatagaaataaagtgcaccataaatgtaatgcccttgaatcatctccaaaccatccaccccactcctccaacccccaaaccagcctggagaaaaattgtcttccacaaaaccagtccctggtgccaaaaaagttggggaccgttggtgtagaggactcctcaagcagcgtccatatctgccctattctctctattcctccacctaggtatagaattctatctctaagacacagacagaccatgttcctgcctgggcaaacacttcggtgactgtgcattgccctgggtgaacgggggtacagaggtctttgtgacgccctgcaacgcatccctctccgagccgcggtgcgctcttcctcctctgtgccttgccggtgcccagaaccacccccttctccctctttgcacaagtgccttgctctctcctttctcaggccagtgctgctgatctgtctgtgtgacccgggtgcacagtccttggctctgtgcctggccctgtgcaggtctctgtggtggcacttagcacatggcgctaagattctccctgataggccttcagcgccgcaagggccagcaccgagtcctgcacatcctgctctagtcccacatcggcccaggggcgttgagctgaggacggctccctaccccgtttctgtgcttggccgactccagcgcccgttcttctgcccctccttggctctgcctccccaccccttggctgaatctctcctcctttcgtgcttgttctccaggtgacttattcaggtccatattttcattacccttgcatttcattaattttctcatttattttattctgtaggtttaggacattctttaaaacatgcaggttctgaattttaataatataaaagtcctctgtgagtgcccatcacattgcttttctgtcctccctacattaaagttagcactgatgcctttatgtttaaggaaagcctcctgcagaggggctctgcccatgtaagttcattggaaggcaggtgtacagcctctgtcacctgaagacctcttaactgtctattccttctctggtctatcgaggtgtattgggggggttacagcaccctctggtggccatattgtcaggtgcatttttgttctagccaaataaaatgataacacaaatcgaatagtcgattggagttctttttcagaggacatcgttaattcacattttgtgtgtttcagcaggtatttaagccattctcgaatagtgacacttatgcagaggagagaatgattttatttaagtaatttctactttttacatagctagttttaaagtagataatacatagtcttaaactttatttcccctttatttctttcttttctgttagagaatttcttaaacttgtagaattatccaaataaaatgccagtcactaaaaaggaataattaaccaatagtgggaaaaaattaaattcttcaaatgaagagtactgtattcatttcatatggtcccagagataaaatgtttaggattcatttttagttttaaatgtttatgaatcagagcttcaacactcttccaggtttctttaagaaaggaatttgtctatctacggattaattaattagcagagcctctctgtgtcaccaagactggagtgcagtggtgcggctgtagctcactacagccttgaactcttgggctcaggcaaccttcccacgttagactcccaaatagctagaccatggtgcatgcaaccatgcccagctaattttttttttcaatttttctgtagatacagggatctcgctatattgcccaggctggtcttgaactcctgaaggcctcaagcgatcctcctgtcgtggcctaagaaaggaattcctcatatagaaaaatattgttatataaatagttgcctatatccatgctgtttatggtaacagctaaggttcatctcaaaagtatttgtatttggctttggaataaaaagaaatttcccctttcatagggttctgagattgtaggagtttttagtatttcaaaaagttaatggaacaatctgtgatgtgaaagagactcagaagaggctagagaggtctttaacacattttttttttgtattgttatcccttccctatagctaactttgtagatgacattgtttttcagactgatgattgtgaccctcaaccatggcagcaacaatttttaatttaaattttttaaaatgcaaggttgggtgattttctctctggatgcttgagttttgtttttgataaaaattctaccaggggcaggggaaagagtccattaagtcttggtgcaagaaacctgggcagattgcctaagtggatatgcatagcaaagaactgaaaacagagtagggggtgctgaaaacacccacagaggaaaatgcggggcggggggtgaatgcatctgctcattttgtaataaagtccttcctttcctttaacatctcttaatgttacaaataccaacaaaaaccatgcatgtcttcagtgggacagaaaatgagggaggcatttagggagaaaaaagtgtcagttgagatgatgttaaaataaagtttattttctttgcagttgcagacattaagatttattctctgggctgttaggacagttcctgcagctctctgtggtgacctgagcattgatacctttttttttttttttttttttttgagatggaatcttcctctgtctcccaggctggagtgcagaggcgcaacctcagttcactgcaacctcagcctcccaggtagctgggactacaggcacctgccaccacacccagctaatttttgtatttttagtagagatggagtttcaccatgttgcccagagtggtctcaaactcctgtcctcaagtgatctacccaccttggcctcccaaagtgctgggattacaggcgtgagccactgcgcctggcctgtgccttggtttctcagatatttctgcccctgtagtgttctatgcactatgcagggaggtcctgactgctcagagcttaaattctgcattcctttattttaagtgtttggccaactgcagaggaaggtaccttgaaagatactccctcttctccctcactgctgggtcccctgtcataggagacctggcctgaggaggcttcttcctggtaacctgggttgtcactgggaccacatcttcccataagaataatgcttcaggttgtatgggagaagcgtctgacagcagtaacttcagcacaccctgagaatggcccttatggcagacacaccggacagcagtcactgaagaaatgagggttgccacatggaggttgctgggaggagggtgctaagtgaaggtgctgtataagctgcatgctttttacaagcagttgaagttctgctgtccagcccagagccactgggccaccctataaataagttcctccaaataaaccctgtgccttgtttgttagctctgggtctcttctttggcttcttcaacttggtgctgtccctgttgaagttaatacgggtttggcacaacacaggagtagacggttacctgtaccctgccagctgtccttgctacaaacatttgcccagagagtggcatttgtgccggttcttaaagtgtttcttgagctgcacattaataggccatgtcctctttcaacctgccctctggctaggtagaacaaacactcttcacctgggctctgagccagctgctcacctgcagcacccccctccttggagatagcttttcatgttgcatcttaccgagttgattgagtattcacttcgaagctccatgctgcacgcatgggcctgtaaatagctttttcgtgcacttgtgggtgtcatttcagatcgcttcatcggatttcagttacccaagtttttacttggttcaccgtaagtttgcaaaaaagactttttgttatcctgaacattgcaggtggaaacatgattaattttgaattatttttgtttaacttctaccctctttcctatttacagcctattttgtttattttaacttccgctgttaagacttctaaggccaggcatggtggctcatgcctgtaatcccagcactttgggaggccaaggcgggcggatcatgaggtcaggagatcaaggccatcctggctaacatggtgaaaccccgtctctactaaaaatagagaaaattagccaggcgtggtggcgggtgcctgtagtcccagctactcaggaggctgaggcaggagaatggcgagaacctgggaggtggaggttgcagtgacccgagatcgcgccccattacttaaaggaagtgggcttgtgttttgtggccttaaggatgtaatctgttggtaggagggaatgagggtgtcctggtaggggtgtctggctttagtgtcaccattcttttaggaattgccatgttgtggggtcacgtcttgtaggagaaacgttctgaagtcatgggattctctaccctcctctcctgctcttggtttccaccagcagcctgcttggtgtggttttgaaatggagcagagatggttttgatgagcctcactggaggtgctgctgagattaccgagaggccttgctgggcacctggagtcaatcatgccgggcactagcatccgtcatcttaggaggtagggattattatcctacctcctaagccatccctggagtggtggcttggagaagttttccagagaaaccgatcagttcataaagtttctgtaaaggattaacacagtgtagtccagaaatgtttgttcatgaagtcttggtttttgggtttaagaaagtgttctcctgtctgggcgtggtggctcacgcttgtaatcccagcactttgggaggctgaggtaggcggatcacgtggtcaggagatcgagaccatcctggctaacacggtgaaaccccgtctctactaaaaatacaaaaaattagctgggcatggcggcgggcgcctgtagtcccagctacttgggaggctgaagcaggagaatggcgtgaacgcaggaggtggagcttgcagggagccgagatggcaccactgcactccagcctgggcgacagagcgagactccatctcaaaaaaaaaaaagaaaagaaaagaaagtgttctcctaagtgctgctcaccctttttcccaaacaggacctaaccctgcgagggagggtgaattaggccatttgtttacagtttcatcagcaccaggcgtgcacggcgttagtcatggtccttgctctcaaggcactgtacttgtagcagcagtatggtgcaaatgtgcagctgaacagtggacacaggttcctggttagcatttagtgccacaggaatgacagggaggtcttaattgtgatcggaccgtgggagctggattaccccagactgtagctcacttccctgtaagcttttggtagggagcttggaattagcaccattagtagaaacagatttcaaagggaatggtacctgttccgtatgaaacactttaaaactcccggtgtccacacgtctttaaaaaagaggcttaaagcagtttcatttcatcaaccccaaactggagaagctatgaatgaccacactgatgaatatgtcctaaaatatatgtatattatataaagtgtaaaaacagacaagcaggaacatactaccagtttctatcacagctacccttaaactatcattggagggcaattaagtgggtacaacctctagctatttggaaatatgtataaaaatgacaaatgcctggttgggtgctgtggctcacgcctgtaatcccaacactttgggaggcctaggcgggtggatcacctgaggtcaggagttcgagaccagcctggccaacatagtgaaaccccatctctactaaaaatacaaaattagccgggtgtggtggtgcatgcctgtaatcccagctactcgggaggctgaggcaggagaaccgcttgaacccaggaggcagaggttgcagtgagccaagatcgcgccattgcactccaggctgggcaaaaagagcaaaactctgtctcaaaaaaaaaaaattaaaattaaaattaaaaagtaaaataaaatgatgaatgcctgtactcttagacccagcactcccagttctgccagttcatgcagcagatacatatgcacacgtacagagaaggatgcaacagatacatatgcacacgcatacagagaaggatacgtatgcacacgcgcacagagaaggatacatatgcacacgcacacagagaaggatacgtatgcacacgggaacagagaaggatgcacaagaacatacattccctagttgacggagtcgcagattagaaacaacagaaaagcgtccattaaacaacagtttgaacctgtgttgagatatcagcatcccttctccttctctcccccactccctctgccctctgcaggttttattctcagcctgattttctccattggatgtcagccctaggctggcatttgcagagagagatggtggctcctgcagagcttacggcctgtattttattgggctgtgttgagttacccctgatgtgagcaggagaatgggatgttctgtaaattggcctctagcccatcgtgaattcatattttttttataatgtgtgagtcacactcccttctgtcttcatttccttttcacactcccagcagatcattctctctattctgattggcattttatacatgaggcagcagaggctgagacctactgtattttgagacactgtagctttatatggcataattaaatcatagtcatcaatcactcttaggaggtaaggattattattggcattttccagatgagaaaaatggaggatgagaaaggttaggcatcttgctgaagtcacagcagacttaagtgccggagttggagctgcattccggtatgcttgcatagactctcttctcatgctcactgcacgccagtcacctggtatgctgaggccctgcctccaggccttctgattcagctggtctgcagccctggcatttccagctcctcaggtgattggaatgaaagccagagctgggagccactggtctacaccaccagtaaatgatcgggttctcacttgatcatttaattaagaatcttggttttctgctttcagtctgagaactcttgttcatgctctcaggcatgtcttcacgcaggaaagtgatctttgaaattaataggtgcttggaaagcctttaagcagcaggcagtggagaaggccactcagtaggaagggccgagcatgaagcctagtgcacaggcttttcaagaccccacggagggtcttcagaaaaatgggtttcctttgtctccgtggcttccagtctttgttggccagcagttgtctgcttcaaatgagctggctctagaggggcctggagaacccagaaaaactttgtgacaacctgacaagtttgtgttaatcttctgggcattggctttctgcacttattgctcactgaatcactgaaccaggcaggtggggtactggagggcaggggatgggtaagaagggcagcctttggaaggaaaatcagcagagggcagggaccggggaagaaggagtaagaagggaaacccttttcttaggttcttataaatcagaagagcaataaagaaaaaatttaaatctaaaaaatacatgattaggatttaaatccagtatgcttcactacatataaacctttgacttaatattttctgtagtagatgaaaataggactttttttgtttcccttctcttcacatggtattgagtttttttgtgttctgaatacgtgttaagattaattatgaaaatcaaattaccagatacttgaaatataaaattagtaatattcaaagacgattaaatgcacgatttccttttctcataaaaaaagaagcagacggaacttgtattctgaaagcaaatatggaaatcacattaaaaatcagaaaatcctcaccaccgccccccacccccatgtgcatttcatttctctttggtctgagttcaagggagagagaatatgaatgtgctgctagctcaggaagcttcagttctaactttctaaagagctgggaatgtgcttgagtctctgttatctcttgtttgcatttttcgctactttgcctccatttgatccagggaaaacttcatggtagggatgtgagatgtattttgagggctaaaagaaaggagtttgaacaaaagcaggacagtgttccgaatgtggaagcaaagagtccttccaaggggatgtgcggccaacgcctctgttcagcgatagtccagctgagaccaggacctgtgcctgatgcccaggccaccccacaggacggtcctccagcacctcatttctcctttcatcagacacctcttcactggcctactgggagaaaacggagatgagtgaaaatgtgcatacagaacatagggctcaaagggaccctagcaccagtggtgctcaagcctgtcccagcattagcgtcacctgggagctccaaaaacatattgttgccaagactcagtccaaagcaagtgacttccttggcctggagtgagatgtgggtggccagggtcaggaaccaccgagtgggtccacctctgcagactgggaaacagagtctgggaggctgcttgttccctcaaggacctgaagtgacatggggaggcaggactagccttggggctcctaattctgtcctggcctgtattccagtgtgccgtggggcacgtccaatttgaatctggccccagtacactctcaagccctgtgttgctctggtcccacagcttctgcccttgactttccatataacagcacattggtggccagggctttgcactaacctacctgcctccaacattgtttttgaataatggaagctaagcagatgcatattaatgcctgcattatggagaagactgtctcttcacaagtaatctgtagttgttagtcttgaaagtgggttaattcattgtctttctagagaaaatgattgcatggcctaatagtcttccagttagtctgtgtggcaaggtagaagccaggagtggattcttagctcctgttgagtgctgctgtcctgaatcagagatcttctctcccgggccactttgtcatgagcaggattttgaaccaagaccttttcttcacctgtctcgggggccctcaccgtgggctttgtgatcccctgacagctccaaaagcctttatcctcatccaatatctggtgaacagctgacacctcctgggaatctttaaaattgttctctaaagaaaccattctgctgcaagtacctatttttagactttataaagcccacgtcaggttgtcgctgcctttctctctgtctgctaagcctgctgtttgaaaggcagcaacaggatcttttgtctttaaaagttcagccccagctggtgcattccccacttgaactccatagccctggtgtgctctggggtacgtctcttccaaaacccaaaccacaggcagtgacctttacaccccaggagttgaaataatacacctggaggaagaaaataacttacaaacaatgagcctagagtataaatggctatgttttaaaaccctcgattttccttgggcgtatttaacctgtacagctagactgttgtgagttttgggctctctagggggctgtccaagttcagaacaagtgcatctgctggcagccagcttaaggagttagcagccctcaattccaataacgaacgtgtaaatcagaattcaggtgtgttgaagtggggccttgcacacatcctggtcagcccagggtgatttcctctctggccagtggttttgggttttttcttcacatgaactcgtctgttgtaactaatggtcactgagtgacttcagaggtagtgatagctcatagtgaagcccgtgacccacagcggtgggcacacctcgatcccttctccttttcctccatccccacctttctctccttacttcatcccttcctctttccacattgggtcatccagcagaagtcaagtatcttctatttcatatctttattgaataagagttttacgatccatgttattgaagtaggtaaatggaatctcttatgtggaattctctaaaaaagaatcaaaactccagtcaaaccaaaccaagtattccaaatcgtttttagggaaaaaagatataattagaaaagactggagagggtatgcaaactattaacattatgttagggtggtaggagtataagttatatttgctttttctgaatttctaaattttcttcaattaacatattgttcaaagtatcaaatacatagaaggaagagtgtgcatgcctgttatctagcaaacacacttcatgcaaagaaactctcctaaggaagtatgaagttatattttatccttatctatccaaagagagtgtgtgtgtgtcatatacctaaagaattagttattaagatgaagcattgcttataatgaaaaagttgaagcaccctaaattagcttaataatggtatatctttataatggaatagtataaagccattagaaatgatgttacagataagtatttaatgttatggaaacattttataacatagaatgaaaagtaaattgtagattggtttgtataatttgatctcatcttaggaaacacataatacagaaatatagatgaaggtctgaagggtattaatgccctaatgtattagtagcattacctcagagaagcaggctcatgagtgtttattttcttttcttctaactaagtatgtatatgtgtaagtgtgtctgtatacaggagatgtacatacacttttcttgtgaagaatctgtattgcatttactactggaagggtttattttagatttagatattaaagttacctctttgagtgagaacctatgatttatacttcttagcttaccttttacctccattatttaaatctgtctttttctgccatcaaatagaagatgtaacagtgataaaaaggctgggtatggtggcttacacctaaaatcccagcactttaggaggccaggggttcgagaccatcctgaacatagcgagtgacgtagtgagaccccatacctacagatttttaaaaggttagccagacgtggtggtgtgtgcctgtagccccagctactcaggaagctgaggtgggaggattgcttgagcccaggaggtcaaggctgcagtgagtcatgaatacaccactgcccttcattcagcctgggtggcagagtgagactctgtctctaaaagtataatattttaagaaagaaaaaacaaaaactagtgataaaaagaacttacaacaaactgatttttaagtggactgttgataattataagggctgagatttttaattgccatttgtatcaatgaataacccccctgtcaccacattttctggtgtgtttggtgtgtctggttcctataggagagacagtaatgctatttgacatgctttattgctgattagaagcctaatctctgtaatgggaagctcagtaatgaagcttgttcagaattgtgttacagtcggttaatgaagctctgagatcaagggcctggcttttgatggcccctatttcagaatccagaggtttgtttctatttatttgggttttgcaggtaagttccctggactgaggtgatctgaaggttagctctgctataataggtaaattgctaagaaaaacattggccttggtatgtacaacttaaaattttattggtgagatagtcttcttacaaaacaatcacgttaagctagaacttggtgtataaccagcatatatactcctgccaccctcagtgtgtagccaaagttctaaattgcatgcacagataacaggcatataattggtgatttcagaaaagttatacctggtgggcagtgagaggcgagccctgatctgggaaaccccagtgcttcaaggggaagcaatctgggaaactccaatgctgggattgggattcaatctgggaaaccccattgctgacaaggtacatggtacaagcttgataaaaacttgcttaatgtcacacttgtaatcccaacactttgggaggctgaggcagctggattacttgagttcaggagtttgagaccagtctgggtaacacggtgaaactccatctctacaaaaaatacaaaaattagcctggtgtggtggcatgcacctgtagtcccagctgctcgggaggctgaggtgggagaatagcttgaatacaagagttggaggttgcagtgagctgagattgcaccattgcactccagcctgagctacagaaaataataataatttaaaaaaacttaatgatgatagcatttgagttggcttttcaatcctggtttcctaaatatgtgagcctggaccattaaactgtgtgacaaggagctgtcatcttaacatacagacattaaatgcattgttcaagatcagaaatgatttcttggttctgaggcactattgactgtgtgtaaggtgccatcgttaatttggtaacaaggggagacagtggcagggaagttccttttgcctgtcttgtgataggcttcctattttctcaaaggttaagatattaaattgtcttaagcaaagaaggtatttaagggcatcatcagggttagttctcaggtctcctgactcctagcttctctagtttagtgattcacgttagcctttcaacagtttaccactcactttaatggtttttcctagctgtcttgacatgcttttcactgcttacatggttagtttcctacctagctgaatgcaggcatctgtgctgtctgctgggttcgctggtggtgatgcagcccacaggtacctgtctctttgaggggagttcagcaaccatctatttatgtcgaaaggcactgtactgggagatgaagaacacggagttctaggcctccaggaatttatcatcacttgctaatttgagctgagcctggcacttgaacataggccatagatttccagatgtgaaaaaaagaaagaaagaaagaaaaggatcctttaatgtatagacttgtctttctgcctgctttcttcacttctgatcattttaaacaattgatatcctagtttgatgtgatcatgttccaacacagcacaacagcatgtatggtttggggcatgcacctgtggcagttgcaaaggtttttacagtgaagtggctaagaggagagtaagaccagtgtatagggtgtggatgaggtcagatgcgagactatttcttgatttgagtcattttatttaggagctatttctttggaatactttatatatgagaatgtacatctgattggaagacagaaggtactgaaatttacctcttgatcaaattattctggtataaaattaaactaaataccaatcatatacttaatttcacagacttgcaaataatatactggggtaatggaagtaagagacaggaccttttatgtggtatgaagttctgtgataattcctatcttcctttgtacctaaaagaggcaccctctcctgtcatactgcaaacagatgccactactacgtgtagacacatttgccagctgtggcacagctggtcacccagccctcatcacagctgcctgtaaaacccagatttattctcttccccctgatcttttttagaaattactggtatcgttttagagagtatccaacttacacacaccacttaaataatgaattttccaatttcttctttttccacggccttcacgtcatctggtaaatattcccctcaggttggcatctgcttctgagaccctgctggacctagatatattcaccagagatgggtgaaggctttggaagagtgaagtggttaggaacatttcttccgatatctcctgctcattgtttttgacctctctgatttccagtatattctctgctccagccacacagctttcctgaacagctaagtcttgctcaccggtcagggaccagctcaaaggctgtccctttttaaatttatttcctgggtcttctcctggcctcttccctgcactcggtggagatgcctgccccatggttttcagtagcgttggctcttagctgttccgttctggggaaggattggttgttttccttttctccatgtgtgttgtgaatttcattctgtgtcaccgcatcacgcgaggtgggtagggaagagaacttttacgctccccgctgtcgttagtggcctgattacgagtctgtgggaaagaatgaaggttggaaagaagatctggtgggaaagaacaagggttgtccttgagcagccaaactaagctgtgagaatgttaatgtaataaagcaggaattctaatgggctgcctgctacagaggagatgggagatggtgtagggctcatgactgtaaaagcaggagccaccagcagatggtgatgcggcctcttggcccaggtgggactctgcatctccccctcccatggacattcacttgataagtgttgggccggtcacccatgccctggtcgttcttatcttatcgaagagtgctaatataagtaagctgtaaattcccattgtaagaaataattgccttttaaaagggagcattcaagaaaaagaccttttggctcaataaagcctttattttcctcaacactcttggctcttaaaaggggcctgttcttggccttgaagtgggaatttacacagaactttaaacagaagaaaccccctctgccttgggctgcaacttgttgtccctggcagggtttgggctgtggggtcatgggatctgtttgtttgaccgttgtatgcaaaaatgattttaaaattggcctccctaatctgttggagacattagttaaaaaaaaaatgagagtaaagaggaaaatattttgctattgggtatgcactggatccatttttaaactgagagaaggtgaaaggggtgactggttgatttcggataatacttttagagccacggggaactgtgaaagacaagaaaatgtaaaaaaagcacattgattgcaggaccggtggtccaaaagcagcacgtgaaagaggtttcaaggctgtttctacaaacaagaatgccaaaggtggcataggacaagaagcttgctggatgtcacgaagctagtggagatgggatccaaagctagttttggctgatgaaaatacaggctcatgccctgtatgtgaggacagtgggacagtaatttaaacagaagtatctagaggagtttccttattgccttgaatgtatttctttttaacattgctatggacatttaggaaaagatgccactgatattccaaaaggggcattccatacacctgagagggatccctgaggctccagggtcacctgggccaagccaggtatacacacgtctcatggcaagttggctgttatcataacttccctggtgttgttttgttgcaagggcagcattgtggggctgtggtttgaattgcttttttgtgtctcttgaatacacgaagttcctcctatagtcattggctctgctgcctctgatgaggcacttccgtgttccccacatttgaatttgctcccgattcgagagaggcaggcatccgcggcagcagcttccaacccagacaggcttaagccgcgcgagggtgcccgggtgggtggctgcgcagggccctacctgggcgggagcggctgcagagccctgtccacgcggtgcctccccagcacggcacctcccactccaggctgttggttacctggccgggagctggcggagaccaggatttctcctcgccgccgttgctgttgttaggggaaacagaccatctgcatctagacctgcctctctctccgctccccacttcagacgagctcttcctgcctggaatctggtaagtgccaccgaaggttccgttccctttattactcgattagtgcccacagcatcaggagaaggttctcttaccgtgaatccattagctttaacccaaatgtgcaggattagggggattatttgaacttgcttgctttctttttaaaatgtccattagacattttttgcatgcttcaaaatcaaaaggcggcacagtgaaaacattttaattatttatgtatttaacctgtatcatcttgtttctaacctcttttcttcagggtggtgcagtcaaaaattacacagatattgctctggtgcctctccccccttttatgaataaattactgcatttgtcatcactgtgttcctgaaatgtcaaaaatagacactgtaaaggaatctgtcatgcagagttcagaaattttcaaatttctgagttcaaaacctcaggtgaagcgaggacagatcttttatttaaaatttgattctttgtaggcttcactgtgaaataagttcaatttagagcatagctaatgcaatcagccagctcgtgatgggacaacatacttctctattgttttacattcacctcctgggatacacacactttctcatttgttttataacctttacaggaaatacctggggatgagtcacatgacccctaacttgagtttttacatgtattcacccagattaaatgattttgctcttatatggataaacgtgcagttaggaactttaaaaaattgtaaatgaggtgcataatcattactcattgtcttttactgcattcttcagccctcaaacatacaaactgttattccctttaagagaaaataaaactggcacttatgttttcctttactctaagttaaagactacccatgttatgtgccattaaaaaagatgtagaaattaatctgtctttttctttgacctaatcttactagcagggatattggggctctacttttctgttctctctctctctttttttttttttttttttttttttttaacatcagccacaggtaatactctccggtaaacatataacttgaggaaaattgaattaggttaatgctggaatagaaaaccagggcagtgcctgctctttttggataattctgtataaacaatgagaaagtctcaggctgccttagacaaaggctgagacgggagctcctgatgatttttatgagggggaagaggagatggtgaggaggagggcaccgagcatgtgcagcaacttgaagcatgtcagaaagaacatttgccagaaatcttcaaaaccgtggcggtcggtaatgtgtgaaattgaacttctgaccctgtttgcttgatggcgacttctcgttgtgcttgagaattgtgtggcattgggtccctggatgtgggaggaacagcaaagtggtttagtgaatagagagggaagtgccttcctttttgggtgggacttgccatgatagagcctgggccgtcaccttaaaaggagatgtttctgttgagagatggaaaattggcaagacaaacgccataaaccttaacctgtttataattccttacctgtaagctgctttgcacgcaaggtgatggttctacctcataagggacaaggaagaacagcacataaacctgactgaatggagtgtggctgtgggtgggagcagctttacaagaaggaaacggggccccctcctgagacacccccgtttgcttctgctccttccttgccattgacgtgcccttctcctgaaactacccacacctgtgtttggcaacaagcggctgccccttgatccagatgcatttttcaacttgcgaactctcacctcttgccaagggacccaagtacctggttaatgatctttaatgtaaatgatcctttgccttgattaacattgagctgggttagtatgcacaggccgagctccgtggtcctcccatgtgatcccttccctgccagccacctgcccacctgtaggaactgggcatggccagttttctctttatgtgctctctttgccttggatggaatttgggctgagaccgatgaggtggaaccaaagctgttcagcagaagagagcaaccacagagcagcctgttgggtggagggcttgagggttcctaaaatccgaggactttctggtgagcctctcccctgagcctgcttgagggaaggcgctgccccacacactctccagtgggtgggggtgggggtggcagcggctgatcaaaggttctcacctgcaagtgataatagcctgggtctctttggcaccaacctgccttcttcacctttctgctcagacaccccttggcacccctacataaaggaaagagctgtctggatggcctagtaactgtaggataggtaaagttagccctttcttctgacctagatatgtgatggtggtatttctacatgtttatgtcgagaactttacaaagatgaaagaaaagctttcagagctgcagaaatgagaggtggcccttttttaaaatttattttaagaaacaacttttaaaaccactttttgaaaaattggatggcaccgtcctgcagcctatcagatttcccttgagaactggggattattggcttattccttgctacctccaatcccaaattaagcagagtgacatgtaagaagctgggtacatcagcctaaagcgtttatcaggtatgtccttcccaactggatcttttctactccctggcccgaattttgttttagggaatggggcctattttaattgctggtggcaaaaggatccctgggcagtgtttccatggtcctctaaggtggagtgtcggggagctgggggacacacagtggtcatgggttatctgtcttggcctctttcccagaccaagttctgtctcatgcttattggtttggctgctagttatagaatctgatgtttaccttagaatcctaggatggaaagggttaagaatgatttctaatttgaattccttgtttctagggagttattaaacctatacattacatttattattttacaaagcactaattcataatagttgacaggaacaactattttttggcttctttgtttttttgtttgtttgtttgagatggagtttcactctgtcacccaggtctggagtgcagtggcgcaatctccgctcacagcaacctctacctcccaggttcaagcaattctcctgcctcagcctcccaagtagctgggattacaggtgctagctaatgtttgtatttttagtagagacggggttttgccatgttggccaggctggtctcgaactcctgacctcaggtgatccgcctgcctcggtctcccaaagtgctgggattacaggcatgagccaccacgtccggccttctttggttttcatattgattatattttctaagacaaatactcatttatatagtctaataaaaattgttaaatctaattaaacaactaataaaaatagttgtttaatccacgttgacatcttcttacattgcgatagaaattttgatatatttatccatatgatgaattgcttaaagccggtggttctcaaccagtggcagttttgccttctctcccacaagggacatttgacactatctggggacatttttcattgtcatattcaagggagtggggtgtgaagctggcaagcatctagtgtgtagaggcctgggtgctgctccactttctacattgcacaggatggcacctgacacacagcctaaagcgtcggtactggttgaccgtatacgaaatgctgtggaagaccaggcacggtggctcacgcttgtaatcccggcactttaggaggctggggcatgaggattgcttgagcccagcagtttgagaccatgtttaagtttaagttcatttaagttctctgaagtggtgattctgatgctatatagatgaaggttggtttgttgaagagctgactctggtatttcatccaacatctgcatttttctttagctaaggatgccttgagaaacattctagtctcttaggcctgaatttgttattagcttaatagctttcctctggttgaatttaaatggaaagaaaattgcatcttgcaacaggaaaaagaacattagggaaaaactgaggaaatggaaataaagtgtggaattttgttaataataaatcaaccttgatgcattaattgtgagacatgtcctgaaccaatgtagatcttaataataggggaaactggcttcagggtacgtggggactctatcttatctttataataattctctaagtctgaaacaaaaaagtttattaaaaaagcacaaacaaaattgctgccattttgttaacagatatagtagtcaatcttactgttttctttttctttgaaataggctgctgcaaaggtatgttctttgttatctcggctctctgctcagggtagccatgaaatggctcttttaaaaatgtgcccagataattttgaaccatttcaaaccatattatgtgattttaatttattttccattgcattcactaactcatttctgggtgatgtatttaaaagactagacagaatttacaggtttaaaaagttacattaacagaaaatgtaggtgccagttgaaatactgtcaactggaagtgctaccagcaatgtgctagctggacaatgggacttgtcccatttttttgctgggtgacagctatcactgcctcagggaggctggtgccatttaatgcctctgataatcagaataagtaattgtggcttctgggtctgtaaagccacaaaatacatatgcaggcctattttaattgacggtaagtcatgaaatacactattttcgtattaagataacgtggatatgttatggaacaaagttaaaaattagcatgaatttttaaagtactactggagattgttggctttaggttcgtgaaccccattcctgcccccacactcctgttagtggggctaccagaggggccagtatgaaaagcactggacttacagatgaaagaacttgagctggaatcaattcgagtcacttaccttcgctacaggtgggcagaggagtcatcctgcaattttgttgtgaaaacagaatgagataatataaaatgtatttgaatacagtgaggtctgtacagatgctgaatctattactttgcagtaggagtcaggtgtggccccacttccccaccttcttacctacttgtatcttagatcttatatatattgatattcacttttggtggactaaggttgtctttgttgcaaacctggactctcttgtattcttgctcagtgtgtgtatgttaatgttagataaagaagattaggctggtgcattggctcacgcctgtaatcccagcactttgggaggccaaggcgggcagatcacttgaggtcaggagttcgaggccaccctggccaacgtggtgaaaccccatctctactaaaaatacaaaaattagccaggcatggtggtgcctgcctgtaatcccagctacttgggaagctgaggcaggagaattgcttgaacccaggaagcagaggttgcagtgagccgagatcacgccactgtactccagcttgggtgacagagtgtgatcctgtctcaaaaaaaaaaagcagaagattatttggaaagctatttttaaattattcttcaaacatatactaaaatagagaagacaacatgagagccaacagcataatgaaaccccatcactcagcctcaaccgttgttaacagtttactatctttattgctactgaaggcagttaaatatttcttggcagtccttttttatttagcatataccatcagggatgacaatagaaacaggtttcaaagtcaggtgaaataatgtttctctatatgagttcaccactaacttgatacacagtttatgtttatgtttatgttcttattacgttcgtgtattaaggcaacctttcatccctgccccctaataggtaactgtctttatttgttctgggattatccctcctccattgccctttttggaaagagtatggatatatttgtattttctcttactcataaagcagcacatggtacatactgttctgagccctggttttctttttttcacttagcgttgtatactggaactcactcaatgtcagtatacagagaattcccttgtctttttataactctgtgctatacgctgacggaagttcattcagtcagtcccctattgatggacacttgagttattctcagacttgtccattgttttgcaaaaatagccctgggcatatgtcatttggtatttttgtcgaggcattccaataaaaataagtaaattcttcctctcttgccttgaagatgtgcagctcctcagtaaccttttattctctaaagctctgtcctcatctttaatccctgatttaagaggtgcagctcttcaggccataaacctttcttcctgcctcaagtttttaaagctacaaaggaacctaagagatcccttgtgttttacagctaaaggacctgagagcaggaaacaaagggagagccggaagcccaggtctcctgttccctgcctggcaggtgatattctttctgttaaactctctttccctctgcctattattggccaggctgtcctccaggacagtgcttgccaaagtgtggtccatgggcagcagcatccccggagctcatcagcaatgtaagatgtcaggccctgccccagaggggctgagatagaatctaccaattactggattccctgggtgactcatgcagtcaggttggagaagcgctggactggtggctttctccagaggagcatgcaacagcggtttgcaaacagggatgatgcagttccttttcaacacgtggatttgcacttcctcctggtgcgctcctccagcctgcctgtcctgttcacaccagcctccccctggaaggggttcagacttgatcctttgggtggtagggtctttcttggatagcgtagccatccattcctgctgcatacattcaacacagccttcatccttcgccatttgtctctgatacttcatactccttttgtttgacaagtgccctagctttatttattttctcatcattgttgttaagggcctattgtgcttgctagtatacacaccactatgtaagttactagttcaatttatttgttttactgctgctgtgaggtgtgtccatgtgtgcacatctacctgtgttaataactgataatattgggcctcagtacatactttttttttttaagagacaaggttttacttcgtcacccaggctgaaggactgagacacacttgtagctcactgcagccttgagctcctggacccaagtgatcctcccaccttaacctcctgagtagctgggactacaggcacacaccaccacaccaactaatttttttattttttgtagagacggattcttactgtgttgcccaggctggtctagaactcctggcttcaagccatcctaccacctcagccttccaaagtgctgggatgataggtgtaagccgccgcacctggccctcagtgcatacttagatatacttaaataaaaacttaattgcaaattacttcttaaattatccacaaactgacttggcagtaaaagtgactacaagtagtgaaaccactgtcataataaaaataaaataaaagtctttattgttagatttagtatttctaatctcttacatttcagttttggaaggtaaatttttgggaagtggtggtaataatctaagtatgtctagattcagtgatgagagctagtacactgtaggaaagagttgagcataacaatatggaatgttggtaaatgtataggggttttctttttaaagacagctttttatacaaagaaacagatgatctttttttttttttctaaactatgttagctatacccaaattagtaaatgttaaaataaccatgactggtaaaaacattttgcaattttttttttttttactttttatataattaaatgaaattctccatttggtagttgatctctcagacaaattaagtcttgccagactgtctgagaagactagtgaatcagaccctaaaaacttgtagcatttgaaaaataacaactgtgtactgcaatttataagggcataattagagaaagtttttcagtctgaagatttatactaatcttatcaccctggttttagagaacccagttcaatccaactgctgtgaaaaagccactgcttttagccacagaaaataaccagtttcatagaatgacttataataaaaaattcaaccattttgactccaaaaacctagctggccgggcgtggtggctgacgcctgtaatcccagcactttgtgaggccaaggcgggcagatcatttgtggccaggagtttgagacctgcctggccaacatggtgagacccccgtctctactaaaagtacaaaaattacccagacgtggtggtgtgcacctgtaatcccagttactcgggaggctgaagcaggagaattgcttgaacctgggaagcggaggttgcagtcagccaagattgcaccactgcactacagcctgggcaacagagtgagactccttctcaaaaaaaaaaatgcctagctgactttatcatagatctgtctgtaccttgtaggcacaaatatatttacaaaataattaatggtgatttacttattcacaataagcagttattttgcttttggtgtatatgtgacaaggtggttatgtggagtacataaaggagtaaagtaagtccgttgacttcaagatgcttacagtctaatagaaaccttgaaatttccactgggcaaggttttcttgggattgctccaaccaaatgaatgagcaggcgtctaagtaaatgaaaatcactctcatcactttccttcacattatgttaactggtgacaggtcatgacgcatgggaattgcttatgtttctgagctttagtcttgtaaaaataagtttagatagtccatcatgttcttcacattagacactcattacataaaaggttttatatgtattgtagatctttctgaaggtcatctatgtgaatgtttaaaaaagaagcaagaaggtgctataaaaagcactagaggtcaaatggtttgcgagacaaaatgaaactctccagctctgaaatccaacagagtatgatgaagaaagggaaaaaatagatcaaaaaatggcaggggaggaactcggcatcaaaccagtgataaagcagaatgtggatcagatccagacatccagtagtctgtgagcatctccatatgggatgtttgggttgagagttcaacccatcaaatacattttatccataaccataagatattctaagatcgaccaagtagagtaagcaatgtagaatcaaaggtatcatctttattatgtcctatttgtgtttcctgcttttgaggttcttagtccttttaattaactcctaatgaactaatatagttttgtggtcaccagcttctagctagtacaggcacagttgtgggttggtaggagaatgagcagtaaagccatgagctaacacaccaagtaatctgttgtgttcacaaatgtccaaaagaataacagagattaaagaaaggtaaatacagccacctggcaaaaatatttacccttttaaaaatgatggaagttatatatagaagaaatgtttttggtaaaaatatttgaaagtttgttttataatcataagtagcttgggctattttgactagaggggtgtgtgtgtgtatgtgtgtgtgtgtgtgtgtggttggcagggagagaaggagggaggcaggcagctggtagggactgtggagtgtgtcagttgggagagggaaatgagatgattaagttagtaagaatagaaaacatgtaggaaggcggatcttgaaatttcagggctattcattagtcattagttgaagatttcacagagaaatggtagaaaccaccagtaattaagaaatagcattattgtttaaaaaaaaaaaaactcccaaaccctttccctggcattctggtagaatatagttttggtctaacccaggtcccctctcatttcctttcacatccccttggttctagccacgctagactgtctgggttgtctgtatatgttctgatgtttgttttcctctgtgctgttcttctggcctcagaatcctagtgtccttgtgcctccttctgcatatgtctggactttgcttagctgatgagatccagttcagataccaccttctgtacaatggcttccttaattcctttaatttctcttaattgcaataaagctatttgcagaggaatgaaagatgctcccctttgcgctgggtacaggatgcactgaaactttcagcatggggcgcggtggctcatccctgtaatcccagcactttgggaggccgaggcaggcggatcacctgaggtcaggagttcgggaccagcctgaccaacgtggcgaaaccctgtctctactaaaaatacaaaaattagccaggcatggtggtatatgcctataattccagctacttgggaggctgaggaaggagaatctattgaacccaggagacagaggttgcagtgagctgagatcgcaccactgcactccagcctgggtgacatagcgagactccatctcaaaacaacaacaacagcaacaacaacaaaaacccaaactttcagcaggagagtagcttggttcagcccagcaacatcggtttgaagattatatcaagttttccagtcaaatgtaaccagtttatggatctgtgtttgcacggggtctgaacctcccctcctcaggtataagctcttggaggacagcctgctgcttaaggtacaggagaattcatctttgctggacatggtaacgtatgcatagagatctggcaacagaacttaagatatgtgggagaaataataggcaaaaactggaaagagcacaagtaagagaagagaaatccgcagaagtgagaagtaacagaattgctggctgaggttggaggcatttaagtgtgtgggtgtttgtgggaggcatggtggtctcctgttccttgacctcattgggcaaatattacagcacgaacatacaggtaggaatcaattgcatccccacctgggcaccttcatcggcagttggggtacaccacttgctacagtgtgatggaataagggacgatccaaaggcactcagttctcccacccatcctgtgcacaaggaaaagacctttgaattgtgtctcccctgttgtcctttgcattgtgaaagtgcatattagttctcccatccactcttttctctttaagctttagcatacggttgtttgccaagaatggaatcagatagaatattttcaccaggaagtgaaatttaaagtgcttgaaaaagatacaaggatatctggaagttccaaccggcgccattttatattttaaccatgacaagtagctgtatatcatggaactttggaaaacagagattgttccatttatttttcacagatgaaaaccagagtgctgtgtggggatcaggaagagggaaatcaaccaaatgccttattttagagattttttttttttttctgggaaattggaaacagcgcttgtttatagccaatgcagcgtccttgaaactctcctacttacagttctggagctgtagtttcctccctgaagaatgggttaaggcaggcagggtaatatgcatagatgggagtgagagtggatggcctacagggttgttaacctctagtgcaacaggaatatatgaaggtacttgggctggtggtcctgtgcagaaccagccagtaggttctaagagacttgatagccgagggtccctgggccctgttccacctttttaaaatttctatgacttagtagcggcagtaccatgcccatcccccagtgatgtttggggtacagctgcacccttggccgtgcctctgcactcactcacgagtgtcatctgacatctggctcttgaccaggatctgaggttgcttaagcaggatccaggtcaggttttttgttcatggaaggtggaattttggacctttcccccaaaaagttgacataacttaaagagaagggaggtatattgagaccagcctggccaacatggtgaaaccctgcctctactaaaaatacaaaaatagctggcatggtggtgagtacctgtgtagtcccacctgctcaggaggctgaggcagagaatcagggggcggaggttgcagtgagccaaggtcatgccactgcactccagcctgagtgacagagtgagactctgtctcaacaacaacaacaacaacaacaaagagcagagtggtattatttcctcactggaacattaaatggttcctactaccaaagagttcctgttctaatgggggtttaatataatagtaacattttattcactgggattcactcgggggaaagtattcaggaacaaagtgacaaaattaaatataggacatatgaacattgtcattttggttctagttcttacaagggcttatggtagcaacccaaatagaagtatttgctctaactaacagataaattattagcacttcagttgtttacatatgagtcagagcatctaaaatttgttcccataagtaggttgagcctccttctcagcctgttgtcatagggtctaaaaatggaaacgtgagtccaaactctttccagatcataaaaataattctgaattagtagagcataaatgaatgtgattttattcgagtgtcattttcaagttccccaggccaggttgagaccttttaagtcatctgaaattccctgtagggaggattaagaaaatagtagcagctttgcttctggccttagacagttttctaatgaggtcagagcctctcaccctgggagaagcagattcactttgccccttcagcattggtttttgagaattgctgtctgaagctattgcatagacaaggtcactttttaaaagggtacatttctgaacctggagaaggagtgggttctgaatgactggctcttctgattaacagagctgtatatcaagctgtgctgaaaatactcctcagatatattaggccacatttatgcatgagtgagctcactgtcgtgacatgggagtgaacctttgctgattcgagatcctggggtgccttcactttggaacactgattctagatatttaatagcagttttaaaattaggctaaatgtagtctgactgcaggattcattccagtgggaatttttttgtttgttggttagttttttaagcctgaatatgaacccaaacatgtttcccaaaatgtgaaatgaagagtgaaaacctaacaatgggataagaaagataatagataagagattatagttcaaactcggcctgcactcaggaaatggaagcaattcctccccctcatcctgcccccctcctcctccccccctcctcctcctccacctcctcctcctccctttcctcctcctccactacttcctcctcccccttcatcctccacctccacctcctcttccacctcctcctccccctcctcctccccccctccccctcctcctcctctccctcctcctgccccctcctcctcctcctccacctcctactgcccccctcctcttccacctcctcctcctccacctccccctcctttacctcctccttctctttctgcacaccccacccccgcccccactagggacagtttactcttccccctcctttcttagaatgccaacaactagcctgttagttccattacttacttgccttgtgactcataacgttttcatcttgggtatttttctttcttggtctttgtaaaaattctaagcatcatagagcatatcacctggagaaaagacctacgttcattatttaatgaaggtaaaaagtaaagaattgagtctgcatcctaagaaattagaaaaagatcaactaagtaaacaaaaaaatataaaaactaggagggaggaattaggagatgataagatttaaaagttatgtaaatccaatagctggttatttgaaatgaccaataaagtaaactctcattatcctaactcaggaacagaaagaaatcatcctaacttagaactagataataggaatgagaggccgggcatgatggctcacacctgtaattctagcactttgggaggccaaggcgggcggatcacctgaggtcgggagtttgagactagcctgaccaacatggagaaacccatccatactaaaaaaatacaaatttggccgggcatggtggcttatgcctgtaatctcagctactcaggaggtgaggcaggagaattgcccaaacctgggaggcagaggttgcggtgagccaagagcactccattgcactccagcctgggcaagaaaagcgacacttcgtctcaacatcaacaacaacaaaaaagaaagaaatagataataggaatgagaaaggagacacaggagatatcaatagactttataagaaaacattacatgcagccctgtggcaacacatttgaaaatatagggctgacttcttaggaaaatacaaattaccaaagttgatccaagaagcatggaaaagttgaatagaccaattactatagaagagataggaaagatgattaaaagttaccattgagaaaggcaccaggaatccatggatttccagctgaggttttgtttgtttgtttgtttttggagatggagtttcgctcttgttgcccaggctggagtgcaacggtgcgatctcggctcactgcaacctccgcctcccaggttcaggtgcttctcctgcctcagcctcccaagtagctgggattacaggcatgtgccatcatgcccggctaattttgtatttttagtagagacggggtttctccatgttggtcacactggcttgaaaaaatagaaaatttgagtgttatttttactcttccaggacatactaaaacatggaaaggttcccagttcattttataaaaccatcaaaattttaatttaaaaatctgatgaattaaaaaaataaaaataaagatcaatattatttatgaaagtaaatgtagaaatttaaaataatttattaacaaatagactcttgggtgcatcaaaacacgaatgcactataatcaatagttattttccagtaacaccagggtgattaactgttagaaactcatcactatcatcagttgttacacaatcatattgaaggagaggaatatatgaataagtcagtagaggctagaaacctatctgaaaaagtttagtagccattcctaatatagtacaatctgagaaagcgaactaggaataaaaataaattacttaaacataaaggccatatatgtgtacacaaacacacacacaccacagcaaatatttcctaaaagacaaaacactaaagccattcaattaaaattaggaatgagagaagaatcttacattttacaattagtatttaatattatcttagaggttcttgtgagtggagtaagacaatgaaatggtcatatgtctagaaatcgcaagagcatctagtaaaaaatctaaaatcaacagaaacaattgtcaaggaagctggataaaagataggtctctagaaattatcttttctgtgttttgaagataagcacctagaaatggaagttaagtatttctttcacaatagcagcagataacctaggaagacattgaactaatacctgtaaccttcttagtgaagaatgtgaaatataatctagagaaattaaaacatgtaatgcctgaatgtatcttattacaaaattaataagtaaatttcttgtgattccggttagaatttccaaagtggtgggttttctctttaattgaataaaataatcctgaagtctttatagaagaataaatacgtactacctgagaggagccaagacaaatatggaaaagaaaaccggtgagggcagatttggcttacaagtaatgacaacatgctaagaataagaagtcttcgtgatcaaagcaatgtggtattgatccagaattacataaatagttcagtggaacagactagagaatctaggactgtgtctcattaagagagtgaatgtataacaagatgatagttcagtactgttgaggttggtactggcataaccagttctttatctggagagggggttgggggaacagcacagacctctatctaatatcataatcagtaataagtcccggaatcttcaaacacttaaatgtaaacaagcaattcaacttttacaagaaaatataagaacctattttgtataatcttggagtgagggagaatggttaagcaaaatttgatacgcacaagctataaaaagagacacactttgaacatatattttatttttatttgtttattttttgagacggtctcactctgtcaggctggagtgcagtggcgcgatcagggctcactgcagccttgacctcccagactcaggtgattctcccacctcagcctcccatgtagctgagactacaggcaagactcactgtattagttctcatactgctaataaagacatacctgagacggggcaatttagaaaggaaagaggtttcacagtttcacatggctggggaggactcacgatcacgggtgaaggtgaatgaggagcaaagtcccatcttacatggtggcaggcaacagagtgtatgcaggggaactcccctttataaccatcagatcacatgagatgtaattcactatcatgagaacggcatgggaaaaacctgcatctgtgattcagttacctcccaccgggtccctcccgtgacacgtggggattattacagttcaaggtgagatttgcatggggacacagagctaaaccatatcagctaccatgcctagccaattttttgtggagacgaggtttcaccatattgctcaggctggtctagaactcctgttctcaagtgatctgcccacctcagcctcccaaagtgctgggattaacaggcatgatccaccatacctagcctgaatatatatttttaaacttttctgtggcaaaagatacgtgattaagtcatagatcaagaagggatatttgaaacagacatggggttactatctataacaaaaaacttacaaattgttaagaaaaccacagaggaaaaatggacaaagaatgttaatatagaatacacagataacaaatgcagacagctagctggcaaacctatgaaaaatagttcatttttgctagggaaatgcagattaaacaatgagacgttactttaaacccatcagattggtaaaaatagagaaaaataacactttttgatagcaaggctgtaatagaagtggcaagtggtattatttctcataatactgatggaaatgtgaattatgggcagttgggaaattgaaaagcagatgggcaatgtatattaaaataaaaaactatcatacctttcttctaagcaacctttgtcctcggttatttgtcttttagaaataaaaaatgtgtgcaaagtcatatgtataaggatatttattgtaccattatagtggcaaaatactgaaaatatgaaaacccatcagttgaaaaacggccaatttatggactgtttgtaccatgtaatattatgagagaactagagctgtatgagagttggctgtggaggaatttctatgagaacttgatgaatgagaagcaatgtgtagaaaaatgtataatatccagttctaaaagacgcattcctcctgtgcccatatgtgtaaatgtgtgagtgtggagaacaagatgaaaatgctcattctgtatgttaagcagggagtggggtggaggttaatgtggaatggtgggagagtggggtggcagggatttccaagtcactcaccagtgatgagtgttaaccacatccccatttttttcctatgaaggaagctgcaatgctgtggtttgaggttaaacatgctggctccttctcttaggtcttgatttggtttttgttgttgttgttttttttttaattctagtctgttcttgttttgctgtgctgatatcctcttagattttacgagcatattaattgtgagtatttaacattcttctttggtttattctgagaccccgtttgcctgccctttggcatcattggcagtttttggtggtctactggtcttcctgtttgtgcctctcgtttgcccctttttcactggaatgtgccaggttgaagcaatatgtagggcccggtgggatgggccaggaggtggcctttcagatgtggctcctgcatggccctgcttgctctcttgagctgcctgcacttcagtcttaggaccacattcctgctttggcctacatgaagtgcaaggtagcagtgggaaaagcagagaggaaatgaagcttcctgataaatcacctgatcgctgccccagggttagtcactctagcccccttggatctcttgactccatctcttgatttgtttcttttgaatttctggcatctggagaatacttgtacagcagcagtcccctggttttgtttttctttcaacccaagcccatcccatatctgttcatgtgatgatactgtgtcttattttcccaagattcttatgactgtgatatttagtctgaatcagagaaagagagagatagaaatgtacactcagagggccacttggatggaaacttctgttgatctctccaagccttagtgggatcatctgtagagcagggataataacagcgcctatctgttactgttagggttactgcaaagattaaaataggtggtgctcttaaaagacttagaacagtgctgtcatatagtaaggattccataaacattagctgctcggtttgtgtgtgtgtgtgtgtgtgtgtgtgtgtgtgtgtgttttgttgttgttgttgttttaaacgggatcatgctggaaatgatagattgcaacagagctttggggttttttctctaattaatagatctaggatgttttctgaggtgtgtcatgtttttaaaactctgtggtatttctgtttctttctttctttcatttttttttttttttttgttgttgttgttgagacagagtctcactgtgtcacccaggctggagtgcagcgatgccatctcagctcactgcaacctctgcctcccaggttcaagtgattctccttcctcagcctcccgagtagctgggactataggcatgcaccaccatgcctggctaatttttgtatttttagtagagacagggtttcaccatgttggccaggctggtcttgaactcctgacctcaagtgatccgtctgccttggcttcccaaagtgctaggattacaggcgtgagccaccatacccagcctggtgtttcgtgatatatctatgtgtgagggtttctgtagttaagttcccatagttgaattcctggttcaaaggacaagaacatttacaatgttcatagacgttgggaaattgccttctgtagtactgcactagtttccactggctgtagtggttgatgagagtaccagtttttccctagttcaatattaacccattttatcagtcttttcatcttcgacattatggaaggtaaaaacatctcattttatgtcttcagtcagtgatgccaagtatctcttcgtgtatttatatttccatttttatccagtgccaactcacatccttctgtcaatttttcctttgacctattaatttttcattgataagaattctttgtaaaatgggcagtttaactccccatctgtcatatgttttttctcatttgatttattgtatatcttgtatagcaccttttaattttaacattgtgtttttaagtgtcttttctttgttgacttggaaagctaacaactacttacagcataatttccttctgttaaaaacaagaaggaatttccccactctaattgtgaaaattatacatttttctaagtctgaaaaaaaatagaggaaaaaacagaaaaaacaacagaaagaacatcagtcactcttaatattttggcattttccttttagttgttttttaggagagaatgtatatttatacttcgcatcataacatagatatagtctattttggtgatttattccaatatgtaatatatgtttctgaatgtacaatatcctatttatcatatctgttaagtttgtttccagtttttcatttaagagagaaaggtactgggaatatctttgtgcaaaacaagaatttttttttttttttagtcagattctgttcctatgatacctccctggaaatgggattcctaaattaaagaatattaggatttaaatacttttggtatagattaccaatttgctttcctaacgtgtggtactagtttatgttgcaatcagcacaaagactcactgtgccatttatcatcagcagagaagagagcagccctgaagatttgggggaggagtgttcgtagagaggcacgtgaaagtgagtttgagaggtttgagaagtagccaggtcagtggggctggggaagggagagagttcatgggggagggctggagatgaaggtaaaggagccatggttctttagggctgtgtgggtgctggggaatttgcatttcctgcttaaggttgtagtaagtcagcctggagagttgcaagaaaggagtggcttggtgtgatttattgtagcaagtgagagtgacccagaggccagttaggaggctgttgcagaggcctgagtgagagaggatggtttaaacaccaaaatggtaacattcagaatggagaggaggagatggtgggagattaaatttggggatggagcccttaggatctgttgattgactggatgtgtaagagagaaagggaagagcagaactgaggaaatgtcctcttgaactggctgggggccactgagatgggacagatgcgctggggagcagtgcagaggtggaatcactgctccttttaggtctaaggcatcccttagatctccaagtggatgtgtgaagatggtggtagaggagaatggagctcaaaagaggggccagagtcatttccatttagatggtctttacagcctaaggaactggcagatttcactaaggttgaggtctttctttcctgtgaaaatgtgatcaggatcctaagtaacagccctaaaaattaaacattaggaatacaaggtttcataaattaggaactgtctgtagctgccagattctaaatgttttgaggatacaaatcttggggtcttttcaaatgctttgagcagaagaggtacatcgtattgtgtttactgaatggcatttaaagatgcaggagacctttcccccttcttgatgaaacaatttgcctttcagatgttttgttatagtgagttgattgtaggaccttatgaagcatgtaaaccacacatttgtaaggcattggaagaaaaagctaacgcgagttaggagggatttaagaccatgtgaggaaattcaagcctatgttgttatcaccaaaccttgcctgtgttatgtaaagatttttgcctgtgtcatgttatcttcgttgtgttcaatttattcctccccctccaagtgtcctagtttctcctctactgtagctggttttgaacaaaatagagaaacttgggtctcctctaccctcagcatctgaattcttctcatttggttactcactgtgttaaaataagtgatatagtacattcttagcagtttgtttatttttaattttattttttatggggctagggtctcgctctgtcacccacgagtgtggtgccatggtgtgattgcagctcactgcagcattataactcttgggctcaagtgatcctcctgtcttagccccacgagtagctggtattacaggtccatgccaccatacccagctaatcttagcaatttttaaataacttttttttccgactgtaacagatttagatattggaaaagataaaacataaagcattgatctacctgtagagccaaatagccacagggatataaattggttaccatttaattttatttccatctatatttggctatatttatatttatgtatatggaaatagtttatgaatttggaatcatactatgatattttttagaatgatgctttttaaactattttatggtaagcattttagtaaagctcgtaatgttatttttaaaaacgtacttttcgaaggctgcagagtatggataaattcatgatgactttttagaggaaaatatcaagatgatctcactaacaaatcctgagattaaaaacaaaagcaaacaaaatacaaaaactgaaccatctttggaatactatgaaattcagattttatgttcttaataaaatcctgttttgaatgaaatcagtcttcatgcttttcttattccttttggctatgttgcctacagttgaattaactgtttttatatacttcctttgctttgcattgaaacaagctgatccattgtgaccctttgtggtatttcataaaaccacaccctaaaaactgcccagtcttttaagtgtagtcaacagtattgagcaattttttgggtaatattgtcggaagtgttaggtgccaaccaacaatggcttattgcttacatttaagtgtaagcaatatacaattaaaggaatgtcatgactttttaacttcattttgaaatttgagtttagaaaaaattccaagggaaatgagcaagaatgaaagcatcctctcctactgccagacttctgggagacccacccctggtcttcccaggtgtctcttcagtgaccttgttggtcgttgagggctgtggaaagttctagggaggctgctcgtccctcctctccttttgcttattgcattctgcccagattataaaactgaagtatctgtcttaagacgccagcagctttttcttcatcaaatccagacacatcgaatcccccacaaccaagaattacccagccacaaaatgtcagtagtgccccggtaaaagaaagctggttttagacttagtctcagaacctggccatcttccatggattatcccgatatgtgcatccttgtctcttttcactatagcctggtgatcatggtggcagttttcattttgggacactggtgaggttagaatagcttcaggcttccctcagtgaatagtattgtgaaggcagtggtggtaacattgtgttggagctggtgtgagggttgaatccactctgtagcctctgtccctagatcatggcgctgctttgattgggccctaattttctcctctagacaaaaggaattgaactaagacttccagcattccctccaggcttaacattttttcatttggtgctgatggtcactgactattttccagttacattttaatgcaagtttggcagaagccgatttctctgggttagggaaaatgacataggtggcagggaggtggatgtacaccatttgtttgatcagtttgcctagaatggaggtggcagaattggagttggaaagatcaaatgtagcctttttttcccttccagaatgaggcttttctatgcatttttttgaggcatgagaacctcatgggacaaggcaaaagtgagcatactcaagtgaagtgtatggttatgggggaatggttattagaaatgtcaattgtctcaattttttagtattaattttcagagggaaacagtggtgtaattagtgttgtgattgtttgccagggcggtcgtaacaaagtagcacagactgggtggctcaactaccacaaatttgttttctcagggctctggatgtccggagcctgcgatgaagcaggattggcttcttctgcggcctctcttcttgacttgcagatgctcctctgggtcttcccaggtcatttgtgtacctgtgtccgtgtcctaatctcctgttcgtataagggcacagtcatattggattgggacccacctactaacctcattttaacttaattacctctttaaataccctctctctaaatacagtcaccatctgaagtattaaagacttcaacttaggaattttgggcaaatacaattaagcccatcacaatcaggtaacatttggtaggacgtgtagatgctttttatctttaagggaataggcaaatcgttaaaaataaataaataaaaacttgttcaacttgtttaggtacattttcttatagtgtattgtggttcttatttttttaaccttccagctagtgtgtaaattggaaacattgtagcttaatttgatagttttagacataatcaaagatgatggaaatcttgttcttaaatttagtctattcagcaacttgtgtatcctcaactgctgaagactgaaaacttgagatgttcctcttgttttaagaatttgactgaaaacgggctgggcacgatggctcatgcctgtaatcccagcactttgggaggccgagatgggtggatcacttgaggccaggagttccagaccagccttggcaacatggcaaaaccccaaaaatacaaaaattagtggagcgtggtggctcacacctgtggtcccagctattcaggaggctgaggcacaagaattgcttaaaccccagaggcagagactgtagtgagatcgtgccactgcactccagcctgggtgacagagtgagaccctatctcaaaaaaaaaaagactgagaatggttggcactgtccccctgtctccaggagggtgaatgtttctagctgaaccctggtgcccacttgctcctctaagccttcagcagtcctcccagcctcaaggggtgatccgttcatcttccccccacctctggaaatcccagcgtttgaacgctggggggaactgcaagtctagtttacagggtttctcagctgagatgccaggaacacttcgcgagtgagcatgccaccacatttgagtgcatatagaaagttagctgtttgctacaactggggacacttcctattagagccgcatctgctggggtggagggctgcatgggttggagagtagggtgtgacttcttccagcaagaggaaagagaagtagcatagtgcccatcgcaggcagagagcacatgtttgacttgctcttggaatttctgtagagtaagggtggtcaggttgccagactacccctcaaacgaggacatggtgctgctgggtcccagggtagagctctgctggcaccttcaaggccctgatttacacctaagggcacacaactgggatctgaaaactgggatgcacagtacagactgcagatttacagggcggggctgtctctcatctgactattgattcttttgggggctgtagtttgtatcatagttatttttgttcctgtttttttcccctcttcaagacaataagcttttggagggccaggaagttgtgttcccatctgccgagtgtggggcctcgagggccagaacctcagaatgtagaagctgagttagtttgtggcagggtgaagggctgacctctactgttggaaatgccaaaatctctgatctggctttaaataagcaaaacagccccgccagacatagagtcatccacaaaacctcatgacctctgttattgcccatcctgtgtggaagcccactgagaacttcacttgaagatgctgcaggaacaactgcagggaacctggagataaggccccgggtgatgatgtaagctaattgctgagctgggtggagctacttaaccttatggtaggaggtggagcttgacgcaacccccttttccaccaacaagcatttctttctacctgtcattgaagtgaatcatcagtataagtagcgagctgggcgcattccttctcagttgtgttaaaacttgctggtattcccccggtatcagcagaggtgtgtacgggcactgctttaaaactgggaaggaggaagacgaggccagggagccggagggtcaccaaggtagatttccagcagcgctagtccagctgaacactttccagccttgtttttcagcagctttgaggaaaagtataggtaagaacaaagacaccactgtatgtttgctatatgaatgcataacatctgttcttggtgtgagtttgatgttggtttaatactgtttttatgtcagcggcatagttctagcatgtaccaagattttcaattttaaatgctttttggtgttcacagttagctataattggtcaattttaccctccttatgcataaaaagaatgataggcaaagaatgagccttgaaaagaattgggatcagaattctggtcccctgttctttgcttcttaactttcttgactgtttagaaaaatgtacagcttttcttccaaaaaccaaagcaataatacttttatttttgaaaataatggaaaacagagaccgctgaagttctatgaatgaggttttctgttttagaaatcacaggttgaggaggaaagaattgtgttttccttcctgttctgtttcgagtctcagtatttctgacttagaaacctcctggagaagagggagataccagctctcctttgtttcaagtaaaataccatcttaggtcataaaatagtttgcttggagaataattcatggcttatatctgaatttttggttggtagcaacagaaatctttctcttcctcggtatgagtaatttggcttacatgatttagactaaattttattatattttttgtttgagaaaacaaaagtcaaagcccagaacatattcaactgagtttttccctcaggttttctatcattttcccacccttcctactcatacatgtgaatatgctgaatgattaacatgtgatttttgtttctttactgtctcatttcatggtgattcataaactgttagttaactggttatagtgtatccatatgttggcaaagcttgaaataaatttgagtgcaggccacaccttcgtattaatgagccgggttactttcagtaaagtatttctgatgtcattaagtgttaagatggccggaattctaaagacaataaaaatgtatcaacaatatgaaatatcaaagcctacagtcaaatctgagttattctttagtacttatttcatagctattctttaatgtttattctttaatacttatttcacattgaaaagtactttacacatgtttgaatgagatattgccagtgaaagaaacaaaaggaagcaaataactctataagggaagtgggattttaaagtatgtttgtgctggccccaggctggtgagtgagtttcattagcaatgaccaggaagagaaagaatgccacagtggtgggtgctgaccttttttttttttttttaaaccttttttaatgtctgtaaggaatacaaggtgaactttaattcttgtgggaatctagtaagatggaagtcaagaagagaggaagaaatgctttttatttagttaagaggaagtaaacatctgtattagttacagatgttatgccttaacctttttcattcctattgtttttatgaaaatttgcctttttaagttaaatgaaggttttctggagtcctgtattgcaactaaatgttgatttaaaacgacacatttgggacattttcttggcactgtggaatataatgaaaagatataaaatgaaggcaggtatgaaattatatgaattctgctacttgagtgtagaagttttattccaaagtggtttgtttggtggatgtggtgatggtggggggctctatgtacttattaaggcaagtgatgggacaggagcttttgtggtcttgacggttctgttgggatgggagggttgtttgggatttttatgtttcattccaggcaatgtttattttttcagcctgtacttcttagggttttaccaagtcagttttcatgtgaagccattttcatatcgtttctttcaccttgatggaaatcttttccttcttatgtgctttgagttaaatatgatgtagtgtgctagtaacatagacggggctttcctttctacaggtgggcttgaagtgagcctgccactcgctcaccttgaatcacggaggtttcagaggccgttggccttcagggcaatggcagaagcacatgttctctgctgttttctgagtctatcttgactgcgttcccagtggcccagaattccccaagggtcactcgacacaccctcgtctacagtaaatatttgtgcttcctctgtgcctggccaggttttctcagtacccaggagcacaggtgggcagtgggatgtgggcaggcggtacccagattccctcccacaggggccacagggaggacttgggcgcttcctgccaagagccccctgcccttcagactaagtggaaatagagatccgggagtccagtggactcagtggagttccgtagaatacatggaaaacgcaccgctttcagtgatgtaagctgtcttgttcacttcacgattactcatctggcctgcagcaggcaagaggatcacatgcaattataaacagcctcctctgactaaggtcagtgactggaaaccctgtcacgttatcagaggtcatttggtcatagattcttgggcagaagccattgagagtcctgggggtgtgatctttgagcctttgccagtgctggggtttgactccttttagctcaattaactgggtccaggagtttattttggccgagatctgccatgctgagttgacaggcttgacactggaaggaagtctctaacttcattagaggaaatggcgtggcaggctttaaggcattttgatatactccactttttctctcttgccctgttttgttgaggttttcagggccataactgtacctgaggttaatcagtgagtgatctatctgaaaggaatttgttctctttgggcaccgtcctgtgtggtattatatttgtataactatttagcttaactcattcaaaaggctatttaagtcacttgtcctgttcattacttgaaaacaagttgtcttctctttattcttttagtcagttaccaaatatttcctaagtgtctcttgtgctagacattgaggggcactccttctccctttcacttgtctgtttttgttgagctacattttttccttaagtcagattgttcttttcctgttacttttgttttcacttgatttgtttatttatatttaaatatgtactttaacagtcttgaagcattggtctgaatgaggatggtgatcagattgggaaaatgccccttaattttggtttaaaaaaatttattttctttaaattatttgtttattgataggggccacccactccaggtgagtggtttctctgtgtgtatggcagaggaatgctctgtgtctggaaaaaaaagtcacttagcttgaaatattatgaaagctgaagagtacaaatgtcagagagaaaggggtattgggggggaagagaatgagaagacaagacacagtcagggccctgtcacccgtgtggaactgcaggtccctggagagatgatgcatttatccctttttagagatattgccattaaaagttgatcttgagcatgacacagaactgaaagctttgatgacaaagccagcatctcagtttagcaataaccaggttagggaaaaaaccccagaaactcaacagtgagattcagctcagcaatgtgggcggggaacccactgtcccgccttgggcagggagcagccccagccgcttcatctgcctgatgctgggttttatccgcttcacaattaaatttcctttttgttatgcttgcgcacatctatatttggctttgcttcttattttttaagaaaggggagaagtgtgggcaaggtaaaatacagcttgcaagctcccaaatggcaaatgcaccagttagagtctaagtggcctcccaaccttaaggtgaaattcatttattcagcaaatatgtaccaagcccatcagggaccactgctcgagataccagtgcaaatagaagaggccaagggcacattattaggtccggagccagtggcctgcacagccatctgtgaccacctacctctctgcttgcagggaacttcagcctggtggaggagacccataatagccaagtcaactgataatagaattagtagtagtgttgagggacataaagaaatcagggtaaggccatcacaattacatgggtggatgatcttttataaaacagcacagttttgttttcttctgccatggtatctcctaacattttccagtgtgtctacttgcagttaatatggaagttgcggctgacactaggttagtggttaaaagaaaacaagaaaaccaacctttagaaatctttagaaacatcattatcatagaaagctataaactcttatgtatagaagggtaagtggccattgatcttggagcagaatgaatggatatttcctggaaaaaaatatttccactcatcaaagatactcaagtctcttctcatctaatcaatattggaaactaggaatatccacgcctatggaatatcctcagagagaattaattattctgccctctaagaggtatagtagtttagacttagaagtaaaggcctgaacttgaggctgcaccattgaaggcaaaagtgccctttatctcccagctttgtcatttgccaaatgcaattgtgttaaattaagtgacctccaatagcagagctctatgttttctcccctgacccccaagtcaaaattgattatagtaatccatcaaaccaggcctggcaaatgatgttttgcaactaaaggataaatactgagggggagggacgaatgtgaacgcatatgcagagcaacacagtcatgagaccattctattacttcctaaatttcttaaagcttttctgtcttttctgagcttctcaagtgagcaggggcatgagttcctgtgttgtgcctggggacagggaaggctttgggacctactgtggtcttaagtctgagcagtgctaatagcctcggctcaccaagtgctgggcactgtgctagagggtgtacaaacctctcatctcatgaggcctcactgctacagctgacagagatgacatccagttgtttttagttgcacatggcagagctagaaaacaaaccagggtgtgtcagactccagagcgcatgccctctgtgatgccgctgtgttaccctagatcaaatcaaccaagccatccgttaaaaaaaaaaacctgatctttgtcaaatatgcaattgttatatttttgttagagtctgcctctccagtgaacgatattaatttccttcaagtggctactcacagatatcacaaaatcagaaagctgcctaccctgcagcctgtatctgcctccacgtccccacatcagtcctccttgctgtgcttcttgtctctttagtttttatcatcttctaacactgtgaactttagtaatttattctggattgtttgctacctgtctccccttggtaaaatgtaggctccgcagaggtagagcgttttgtctgttttcttcactggcatatctcaggtgcctaaaacaaccatgccagacatgtagtggtgccagtgacaacttgttgaatgaagaaatgggagaaaaaagcagaccccggagacttaggagggtctgtgtgagggagtctccaggcagtcttcctgggggtgtcctgaaggacctcctgatcgtgattttggtcagtgtggaggctgtggtttcttctgagctgtcagtatttggaggtgagttgtctgcaggtcacctcatcccacctttacacattagtaaaatggaattcgctgggtgattcttaggactgtgcggtcagtcgaattaccagacgtccctgcatgctctgtctaagggctggagtctgctttccttgcttctcttctagaaagaggtctgtccacaagggattagcctcgcgaagttcctactgttgttcattgacccagtgagtgttttacccactgtgggtttttcctacctaattgcccctctggttttcagtgttcaacatgctgcagttacgtgttctgctgtggttttacttagcttaatcctttattaattgcctcttgttcaaactccctaagagcagattatccttctctttcagcttctgctccattgctgttgaacttttttttggtcgtgacatcagaaaaataaccaagtgtgagtctgataatagcaagtaaggctattttatttctatccaatttaccccaaatttgagcagtattacaccttaaaataatagagctggctcttgcccagcatgtgaaaagtgtatgcttcacgatggacagatattttccagtatctacttaccataaatctcaagatttaccctaccccactccagccattacccccatgtcccatttgcctaacctaccctagggccatctcagtgccctgtaaagcaacctttgttgcagacccactgtgtgactggaatgtgatgcacacaagtgaccaaggcatggccctgttcgcaaggagcttccagaccaatagcagaaatggacacataagtaaacaactgcgctactgataggcttctgccaacaggagtggagcttgagggccaggaagccttcccagaggcactggagcttgttttaacgttacgtgcatgccaggtggggggcaggacatttctagcagaggagaaagcatgctgtgctctgagaactaaaagtcatagtcactccacttggtgacatgtataaggcacatggaatagggccagagctgggcagaccgtgtatgccacaatagttcgttgtaggttacaaagaaccagtgcagagtgggtgaggcataggctatttgattaataatttggctgcattgacaagatacggaaaaggcgaggttgggactttccgtgaattttctcctcaaggtgcttaatcagtgaggttgggatggccggagggggccctcatttgcttgcctggtgctcaagcctgaggtcctggcctttaatagtcagggaggtctgtgtggaggcagggtgtgagccccctccaaggaaagctgcagtgtgaaaagaggcccaggatgagcgttggggagtatccacatacaacttgatattcctaaagtctcagttctttatgggaaagcccatgcactcttccacacttggaattctttgcaaagtgagtggtatttgagcttctttagagtcttgctactcccaccagctgtactggcatcaccagggagcttgttagaaatgcagattctcgaggcgcggctcacaactacccaatcagactacattttaaccagatcccaggcaatccctgtgcacgtgaagtgctagaacactgctctgcggtaaaacgactttgctaaccatggaagagggtgatttttttcccttttcctttggtgttttttataggacctatttaccttttagaactttttcagaattatggactgcagaatatatacagtgtcaatgtcattagcaattcattagtgatatttggctagaatacatagttgtttccacacaaatgccatttcttacattgagatggcacatgtctggttaggacttgggctcatttgtaaggagccacgctgcaggtaggcatgctcccgggacattagttgctcaggtttcaaactgctgccccagcatagcagatggcacggtaacaaagtccctgtgcactctcacattgcctgcggtgatctatcacacattttgtcccctaataacctagctgggggggagctcatgtctctgtttgtgctaatgctcgctgtatccccaagtggcagtacttaatataattgtcattgctctttaatattatctcattccacgtcagctgcacaaaaatttgaggttaatcacaatgaatgttttctcaatccttgttattgagagctgtttaatagtttattttgtatgtgaagattcatatctagattgaggcttatacaacttcatttaaagacagctttttcggctgggcgcggtggctcatgcctgtaagcccaacactttgggaggccgaggcgggcggatcgtgaggtcaggagatcaagactatcctggccaatatggtgaaaccccgtctctactaaaaatacaaaaattagctgggcgtggtggcgggcacctgtagtcccagctactcggaggctgaggcaagagaatcccttgaacccaggaggcggaggttgcagtgagccgagatcgtgccactgcattccagcctgggcgacagagtgagactctgtctcaaaaaaacaaaacaaacaaacaaaaaaggaaagctttttcaggttggaaaaatatcaacagcagacatgaaaaagcatgaaaaatgacgctaagaatgtaagcaactggaaacaaaaattataatggtgcatagtgagctgaagatctatatttaaatgtgaactcccctttcagtttataagtgattactaacagcctcatcaggtttctggaattaaatgttttattatttcctcccaaagttagtcctcaaacattagtatttcttgtgttcttttgatttgaatatttgtttttaacacacaaggatatcaactctataagtcagttaatatgttcatgcttttagttaatcgaaagtggcttatgatttcagtttttggtatcaggtgatgttgcggaagtgaggttcactgtgaagcttcttctttttttttttttaatcattttgttgtttctttgagtgtatgtgagcttataactcaagacactatgtgaaatgaccctgtgtttcctacattatagaaaagaggaaaatgaagcaagttcaagaaaattagatttatgtggaaaataaattctgcatctagttattcattatcaggtatgagattacaggcatgagccactgtgcctggtgacctcatttgaactcgattacctctgtgaagaccctgtttccgaagaaggtcaacattctgaggtgccattgtcaggtatgaggtaaacacactgagaataccacattttggcaactcagacaagactattttccaaacatgtaaccctgggaagaaggtaacctatcatagtgtgtgttaagaagtcaagcaaccaagaaatgttaattgaaggcccgttttgtacaaggttgcatggaaaagacacactagcgtaagacatggacagtggccctgagtgacgtgcagccggtttaggcgaattaagatttacatacttgaaaagggacaaacaagtctggacgtggtgactcatacctgtaattccaacactgtgggaggtggaggcaggaggatcccttgaggccaggagtttgcaaccagcctgggcaacatgggaaaacccctgtctctacaaaaattaaaaaaaaattagccatgtgtggcagcatgcccatagtcccagctactcacaggggctgaggtgggagaattgcttgagcccaggagatccaggctgcagagattgtgccactgcagcctgggtggcagagcgagaccctatctcaaaaaaaaaaaaaaaaaaaaaaagaacagaaaaggaacaaacaacagacacaagattccatggaaaagggagtggtctaagtattcagactgtaggaattcagagagtggagaggctggttattatgggggtgcttcatcctggggagttgagggaaaggaggtgctggctgcctggagcctggaagaatcaaagatttccaaggccatggggggaaagcatgaaggatgagtgaatagacaccagggctgagcaccctgaaaactgtgaagatactagattgacctgtttggaaaaccaaacagatgtggctgttattgacaagtggttttgtttttgttttgagacagagtctcacttggtcgcccaggctggagtgctgtggcttgatcttggctccctgcaacctccgcctccaaggttcaagcagttctcctaccccagcctcccaagtagctgggattacaggcatgagccaccatgcccggctaattttttgtatttttagtagagatggggcttcaccatgttggccaggctggtctcgaactcctgagctcagatgatccacttgccttggcctcccaaggtgctgggatcacaggcatgagccactgtgcctggccaacaagtggtttaaattggattctccatttcccacctaatagaaagtcggaagcatagggcaaaagtaaaggaaggaccctgtgttctgctggttaaatataacagaggtctgactccatggctattataggagaggtgcattttgttctatgtaaattatcttgatgtgtcccctgtgcctttaccccatgattatttagcacttttttctccacggtcacagggacagggagaaacatacacccataaaacagtgtcatctagaggcaaaaacttgtaatgctcaagcatgtgctctgacgaggtggggcagggtgtgtaggaacaacactctactaattattacagagcttgctctgcactctctgtagaagtccttcaatatccagtctaacacacacagtaacttaagagaggattttaaaaaatcaaaatgccctcagatttgtattggatttaaccaggctgagatccctgagatccaaatataataatgtgtcctttttggatgaatcagacacaagcaaaaatctccagtgtgtgtccagctttagaggtgtagtaatggattccacagttcacgctggtgggccagccaagacttttaatgctgatgtgggcttcattctttctataaactccctttcttcttgatagtgcatgggcccaggggttccaaacatgggtacctgccgtaattgatctgtgtaaccggagaaaatacatatcctatggcacccttgtgtcgggatatagggggcatcaccgtaatgtggctctttttctgttgattatagttttttctttctgtgatcacacaattgttttatcctcgcttaaaaaatttcaagaagtgcagcactcagaataacagaaaagtcaggtgtctggtggtttgtttgcacatttaatagacttgaagataaactctctaaacatttattttgcaagttgtttttctgagagttgaggggaaacttttgccctttggtctccctgaggaattctaggatttcacaggtaggcgtgtgttttggactgcaggctgaacgtggttggcagggtggcatgaggagggcacatattttaagcgttcttagggcagatccacgatcctttacctgccatttctaagtccaaaaagccctgaaaaccaaagacatctttacaggtttgtaggaaattgatttgagagcaaaacctgatgtgaacagatttgagagtattctaggcatcttgtataacacttcattcaatgctttgtgcctcttgctgcacagatattaacattcacttatgggccctgccccatcccctactggggatgctatgcaataatcagaataatcaaactaataataataataataattggaataatcactgagtcattgtattagtccgttttcacgctgctggtaaagacatacccaagactgggtcatttataaagaaaaagaggtttaatgtactcagttccacatggccggggaggcctcacaatcatggtagaaggcaaaaggcacatcttacatggcggcagacaagagagaaatgaaagccaagggaaaggggaaaccctgtataaaatcatcagatctcttgagacttattcactatcacaagaatggggaaaactgtccccatgattcaattatctcccactgggtccctcccacaacatgtgggaattataggagctacaatttaagatgacgttgggtgggaacacagccaaaccatatcagttatctttctaaagtgagacaaaaagtcagaattctgtaacacattttttcccaagcgtttccaaaaaaggttggctttaatggagtattagtttgctaggcctgccatggcaaagcactatgaactaggtggctaacaacagaaatttattttctatcagtgttggagtccagaagtctgaaattaagagtcagcaggattctgctgtctctgagccctatgggaatatcctttctggctcttctagtttgtgatgtttgccagcagcgttctctgttccttggcctgtaaatgacaatcttctcgttgtatcttcacatcgtctttcctctgtgcctgtgcctgtttgtttctgtgtctacctttcccctgttcataagaacaccagtcatattggatcagggctcaacctaatgacctcatttctttccttttctttctttctttctttctttctttctttctttctttctttctttctttctttcttttcttttcttttcttttccttctttttttctttctttctctctctctttctttcttctttttctctctctttctttctttccttccttccccccttcctgcctccctccctcccttccttccttctttcttttaaaaatatttttcttttttttcccttccttcctccctcccttccccccttctccttccccttcctccctttcccccttcctccctccttctctccctccctccctccttccctccctcagggtcttgttctgtcatctaggctggagtacagtggcatgatcatggctcactgcagcctcagcctccctggcctaagcaatcctctcacctcagcctcttgagtagctgggaccatgggtgtttgccaccatgcctggctaagtttaaaaaaaaaaatcgtagagatagggtctcactatgttgcccaggctggctttgaactcctgagctcaagggatcctcctatctcagcctcccaaaggggcgagattacaggcatgagccactgtgcctggtgacctcatttgaacttgattacctctgtgaaaaccctgtttccagagaaggtcacattctgaaatactgggggaacatagttccccatcttataagatagagaatggatcaagacgagcagctccattctttgtttgtgtttaggccagtgccaagttcaagatcttgcctcagggctttcctggtacccctgggaatgtgtatcagcagcagctgtgtcactgaatgggtgtcacctggggggctgcctgttcagacattagaagctgccacatcccctgttaactccatgtgagggaggaatcccttccctccgacaatttcgcctgtgagaatcaagtcagattttgcagtgagaactgagctgagtgtagaataagttcccgaggtacttctggcaccgttgttactcccccaccgagaagcccagaatgttcccaggtgtgttcaaagattgtacgggaagggcttaggacggtgcttggctcatataaacactcagtggcaaagaggttgatgcttaagtacacaggaagtgtttaccagtacacataattgtataccagtgagctccaccattcaatttactgtctgtccggtacattgaccctgtgaggcccactctcggtgtggcactgctaacaggttttattgttgcttactcacttgaaaagtgtctcccttggctagacctttgtcctgagcactggacacacataggtgctcagcagcgtccctctctgcaatgcaaaagggataccgtgtgcctctgcatgtcagctctagtcctggcatcccaggagcatacggtgacagtggaagtgaagtgcaagccgagtcctgggaaccaatgtctgccagaattaattaaaagtaagcatctttttttccctggttagttaatccaggatgaattccctgagtagttcctgccgttagaacttgctctcttttttagttagacacagctcggtgttgcctccactttgacatcacgttcatagttcctgtgcttggccagaactgttttcagttgcaaggacatgggtgagactggtcaaggaattgactttcagggttccaagggaataattagttcagaagtctgtccccatacttgttttccagtacaatctgtgtctctgtgggtgttttcttttaaggctgtgtgctttataaactggagatagaaggagccagtttattataaaaaggataaaatataattaaacaattaaaagtatgtctttatagccgggtgtggtggctcacatctgtagtcccagctacttgggaggctgaggcaggagaatcgcttgaacctgggaggcggaggctgcagtgaactgagattgtgccactgcactccagcctgggcgagagagtgagactccatctcaaaaataaataaaaattaaaataaaaataaacataggtctttggccaagtgtagtggctcccgcctgtaatcccagcagtttgggaggcagaggcaggaagatcgcctgaagctaggagtttgagaccaacctgggcaacatagtaacctcgtctctacaaaaaatttttaaaaattagccaggcatggtggtgtgtgtctgtagtcccagctactcaggaggctgaggtgggaggatcgcttgagcccaggaggtcgaggctgcagtaagccatgatcttgccactgcactccagcctgggtgacagagcgagaccctgtctcaaaaaaaaaagaaaaaaaaatttatgaagtactggttgggttaacgtttcttcttctaaccatgagggaagtaggtgggctgttctggtgactcagtgtcctcccagactcactcatgagaggaagtattcacggactgtggtgatcttgtcttggaatttttttctttgcctcctggcctcacagccgttccttttcttttacacatccatgaaagggagactctaagatcttccttgccaaggttgttgtagggatgagcgatgatgtctctgaggcaccaggcacggtgctggcacccagaagctgcttaatgatcctggaagttatgaccattgctcatagtttttcctacgtttcagatcatccttaaataattgtcattggctgggcgctgcggctcacgcctgtaatcccagcactttgggaggccaaggtggttggatcacctgaggtagggagttcaagactagcccgaccaacatggagaaaccccatctctactaaaaatacaatattagcccggcatggtggcgcatgactgtaatcccagctactcgggaggctgaggcaggagaatagcttgaacctgggaggcagaggctgcggtgagccaagatcatgccattgcactccaacctggacaccaatagcgaaactccatctcaaataataataataataataataataacaacaataattgtcatttatcagcttcttcgagctcttaatatatatatcgccacctttcacaaaggcaaaatctgcattagaaacactgttgtctgattttggttcctctggaggaggggtagacagtctttttgtgggcagggtctgtgtctgtttacctctattccccgccccccactttggtgcccaccacagtcccttgtgtatggtggatgctccttgactatctgaggaataaaatcaattgtgaaacagtttccaaaaagggaacagtttttgtttccccgtttccttatagccttgtgagttgctatctctcttggctctattattaataacataaaagaaagagctgttttcttaacctctggtagttgcacatatatggggaaaaggcataagaaaatatgctggcaataaagacaagtcacagattgtcattttctttggtgactgaagggatatttcagtaatttataggtgaaatcttcctttttgtgacttccactgaacaacatttttactaccaaaagataagggaacaaaattttttaacaaactatttaagcttaaatatttaaacatttttattagtcaccacatattaataaaatatttttattagcacatattttattagtcaacacatgtgtacacagctctgatgatctctatgtagatgcctatataaatagctatatagatatcatcagagctgtgtatatatgtgttagagatagatgcacatacagttgccccctgtctcccaggggtctctgtgacccaaggttgggaccctcaagtgactagttatggatggcaaggggggctgcaaggccagagttggtcctggctagagatttcaagactcgagtggctgggaaggttttagaatgcaggtaaaccactagttgctccaaacaacaaaaccatcataatggaagcatccaaaagtgtgttcttcggcagcttcagagactatgcctaagcaataaagttttaatgtcttttttagctgcttaggtgaagaatgcatttgactgtaatctaacccattaatctcttatttttgctggaaaattgtacatatttaagagtagtggctcattgccagtattggtgatgagtgatatattttaaactatgcttcatacctttcagtaaatcttgggctgaaagatatgtacgttttgttttcaaaatttttcagtagtcatctatttaggtcaattttctgggcaaacaaaatatttgaagccctttagggtttgttattgagatgtaggctggccatgaaattacagggttcagtacctcattgaagtgtatatgtaactgttattagttttttgataacttttttatactcataaaagtagtacttgcttacagtagaaacttaataaaaaccataaatggaaaaataaaccattcgtaaacatcatatagagagaatgactattaacattttagcctaacatgattttaggggtttataatattctagtatatgattgtaccataatttatttaattgcttcccaattattggactggaagtttgcttctaattttttcttattatatatgatgctgtaatgagtaccttttaccagtaaatatttacctgcctctctgattacttctttgggattaatccttagaaataaatttgatgaatcaaagggcatcaaccctttgaatgcttctgatacttctgccatgttgtttcccagaaaagatataataattattccttccagtagtagagtattaaatgtctgcctctctttagaaagtattaccttttttcaatctttgacaatttgttagataaaaacttcagtttcaatattattgcatgtattcatggatatttttcttctcacacattctagattttttctatattgtttataaatgttttataagtgttattactttattgaggatagaaattattatgtaacacttgatggtaacagtaaaagtggaaaagaatgaggaaaccttcaacaaaacaagttgtcattaacaaaacgggttttgcaatgcaactttctgtgggttagctaaatctttagtgtgtcaggtagtcgaaagaaatttgctgtatagtgctgtgaaatatgctgcatccatgagccctctgctctttgcccatagggagcaaagacacaatctttttgcaagctgtcccagtgccatattgaccatcttccttttacagcaaaaagttattgcttcctttggttaaggttgggacacccctctggaggcacacttgaaaaatgaagacctttctcgttgttcttctgttatccaagtatcttggaagaacacctctatagcaggtagacaaggcagggtgtcattgcaatctggctgcagactgaatgtaatcccccttgacattttgccccttggaggcaactcctgccctcccctctccccttacgaccctgcccccttaaaatatgtggagctcagcaaagactatttattctgataaaaatgagcaaataataggtgtgaaagaacatggaacacttcagtgaatcaaatggagaggattaagcattaccccaataatgattggtcaggacgactgtccctgtggagtgtgtcccagaagggttgagcaatggagcaaacccagaaaatctcattctcaactctccctgacagatgacctcgtctgcgctgtcttttgcttcatggtgatgaaggtggaacaagacccttgaataagatttccatctctgaattctttaaacccatttgagatcagtgcaggcctgcagtctctctattagaactggagcagaggcccagaagagagaactgaattttcagcactggattctatgttgagaatgaaagagacaataattgaaaagcttttctcttggaaattttgcaaaatccgagtggatttttgaccaggatttcttggtgacctctcctgagagagcaggtgcctgaggatttcctgctgagtatcttggcatctgtcagactccttatgacttcattttagttcagggagtctgtttcctagccattgatttcatgcacaattcctggcatgtctcatatctctaaggtgatgtcacccttgtatttttttttcagatgtaatcttttatgtgacagtgaggtgtcttacttgtgagtgaacagctagaacctcccaagtggtttttcttttggattttgtttactcagtgaaaaatactgaggaacctgagatccttcagggtgcattttggtgtctgcccaaccttgacgtggatttggaggccaggctcaatgctcgaacttcttgttggagtggcactaaatcattaggatccctgaggacagacagttcaggccatcattatttggtaggcccttgcacacttacacacaaatgcatcattatgaacatggagcagaagattctagggccccgtgtgtaatggcacaatttgtcaagaggcctgagacctggagttggcatggattccctctcctcctgacccacctacctgctacattcagttggccaccctgttcttttgagtccacctttggatgagtagtcagtcctttctgatttttgccacctctgcattcagagctttcttattctttggcgcggaggccttccgttgggtcccactgcctgctgtcttatctccttctaatgaatatgatcatgatttttctgtatttagacaactccacgatgaggaggatgatggcggcagctaacatttatgtatgtatgtatgtatttagagacagattctctgtcacccaggtgcagtggtgcaatcttggctcactgcaacctccccctcctggattcaagtgattctcatgcctcagctccccgagtagctgggactacagatgcacaccaccacacccagctaatttttgtatttttagtagagacgagattttaccatgttgtccaggctggtccggaattcctgacctcaagtgatctgcccaccccggccttccaaagtgctgagattacaggcgcctgcctccacacccagccagcagctaacatttattaagtgctcactatactcctgccaagcactattataatttgtcttctaacaggctttttataagggaagtgctactattatacccattacatagatggtaaaactgaggcacagagaggctatgtaagtttcccaaagtcatgtactaattgatgaagacccagggtttgagctctgcaggaatggccgactccttgtggtttgagcctgggctccctctccatctgtcttttctccctgagccctcctgactgcagccatgccagactttttaatgttctgaaccccagctccagcctatcactggagctctgcctgtgatctttccacctcatgcctcccggttctatgtgtgccttcagactccatctggcagtggtatctggatggaccagtgcatagaaatcacatgagacactcaataaatgtagactcctagtgattctgactagcaggtctggggtggggccaggtacccagatttgcacgggaagtcagggaccactgctgctgactgcttttttcctgggtgcttggcacactctgtcacaatcatgttttcatttctctatgttccatttcaactggatagggacagtgtcttttgtttctggaacctgtctcttttcttggcatatagtaggcactcaggaaatagaaggttgcttgaatcctagtaccagtttactatctccttggaaagactgaaaggtagaatgtgatgtctaagcagcttcactaagcagagaaaacaaaaagtttgcaaaatagaatttgccttttaatctacatgttcttgcgtagcattgagcttcctagagagtcatattcatgctagccctgagttgtatcagcagcagccactagaacggtaacttgatgccaagagtgaattctgatgagcttcattgtgagtaagagtcccagtttgatcatctctacccagatcccgtgggacctccacactgtatgaataatgaggaggcgtggaatacgtagcatgctgcagttggccagcacccagtgtgtactgtgaggtaatcagtgtcaaatcagtcattgtagcaggagttgggagtcaaaaggagcaacagagaacctcacacgtctcctaagagaggaagcaaagaacagttaccttggctgtcatttatggggcatttgtattgtatgtttggaatggtgctgggtactagtattaatacatgattttctctggtctttgcaaaaactgcctgagttaggaattgtcattcccatttcattcatgagcaggctgaagttaagagtggttaagtaccagctgaaagggaggaggagcctgagagcaatctgggcacccgttctccccctcttcttatttatgaatgaatgaatgagacagggtctcactctgtccgggtctcactctgtcgcccatcctggagtgcagtggcacaatctcggttcgctgcagcctccacctcccaggctcaagcagtcctcccacctcaacctctgtggtggctgtgactacaggtgcatgccaccacacgcagctacattttttttgtatttttttgtagagatggggtttcgccatgttgcccaggctggtcttgaacccccgggctcaagcgatctgcctgcctcagcctcccaaatggttgggactacaggcgtgagccactgcgcctaaccctctcctcccctcgagcttacatcctactgtcctgtagccagctccaagatgttggcctttggttctctcttcaggctgaactctctttcagggagtttcctaatcgatcttccatagagttgatcataccttagtacctacctggatgagcactcaagatgttacatattcccacctgacttctttattactgctggaagatatggtgtcccacacctaagtatcccacccacagtccccagctgcatgtgtcgattattgtgagctattcaagggatacagactgaggtaaatgaaccaccagtggaagaatgtggatgttctattacaggaaatgcttagctctttattgcagttatataatagccggcaatcatgatagctgaggggcataaaaatgagagcaacagagtttatggtattctttataactgtggattctgtatgtgcgtgtgtgtgcacgtgtgttctgcatgcatctccacggcacattatctggaggtaacatgatcatcaggccttgagctcttttataagcaatagattgtggctggaaattgaaaatttagtttctgtagctagaaaatactcttttcaaatgccatctagaacagtagttctctgagtgtggttcctggatcaggagccttggtatcactgggaatgtgttaggaatgcagattcttgggttctaccccggattgaattcagatttgggagcggggcccagttatctgtgttttaatcaccccctcccccaggtgaatctgatatgctaaagcctgagcctcactcccctggaaagtgacgcctgattcatctgccagcccatgggcacccattaggaaggtgcttatgggagctttgacctgggctaggtgccggctcttgatccatctttttctaaggctgagggtgtccatagaaggagaagtaggtgcatccgcttagatgttatttaaccaaataaaggtttacagcttacagaaaagaggcaagattaactaataccttccaaaccataatgtaaaaaaaaaataaaaaatatttactcataatggagtataactgaacaaatcatgttgctaatttttttaggatatgttttgtagcttccattcagatacatcttatgggtaataaatacacacgtgaacacacatatgtgtactaacaatatttttcagacttttgattttttagatattgagtatagccttgttactaccaaacttttatcatacttccttgtgaaaggatttcatggcatatttattatttgaaatatcaaatagaaatcagtacagtctcagcattttaagatacttgatgtaatctttggaaatatcttagacattgcaaaataagggttaatagtcatagtatagccactaacgggcagttctgaaattacataaagttaatctgatgaactgatagcaatcagtttttggctatacataactagataagtgagaatttagagattgaatacatgagagccctttttatgattttcaggatctcaagtatgaagcaaaataaattcttctataccctaaattcttgcaaagtgatattttgattagatttgagctaccccagggctagcaatacttgaaagtgtgactagacttaacctcttagtagatagtccgcagtaatcctttgaaatatacatcttgctaaaagttcctttcccaaggaaataatgattaaagataatgtgatgtgtacaaggaattctgggacttgtagtcgagaaacctgaactttaatctagactactcaaatttataactttaggcaaatctctcttgactttctaggctttagttttctagggttttgttttgatttgtttttttatgtttttgtttttgtcttttttttggggggagggtgttgagacagagtcttgctctgtagcccaggctggagtgcagtagtgtgatcttggctcaccgcaacctctgtctctcaggttcaagcgattcttctgcctcagcctcctgagtagctgggattacaggcacctgccaccatgcccagctgatttttgtatttttagtagagacagggtttcaccaggttggccaggctggtcttgaactcctgacctcaggtgatccacctgcctctgcctctgaaagtgctgggattacaggtgtgagccacctcgcccagccttgatttggtttttaatctgtaaaatggtaggtgttgggtcacatgaacaatggctcttttacctccactaattacctagacgctagaaataagaatatggataagacctaaaccaaattttctagctaaattttgtaaagtctgaacaaaatctgtgtgcgttttaatctttcttgtaatcttttcagactctgtctttaaaattatatatatttttagcttctaagtaaacattattggcactggttttgataggaactttactccaagtgtattgacttagtagatatgttaaaaaggttattgcttagtttgtggaaataatacaagctgagactttaactgatatttgtattttcatttaggttccactgttttctcttttgaatgaaaagtataatcctattaaatctaaaatattttcttacagtgatccgtatgtgaaactttcattgtacgtagcggatgagaatagagaacttgctttggtccagacaaaaacaattaaaaaggtaggtgtcgatctttaaccaaatgtcatttaagtcataatttaatccaattatgcacagtcatgtgctgcttaacacctttttggtcaaggatggactacttacacagtgatagtcccgtgagattataatggagctgccatatacaagtgcatcactttttctcttttttttttttttttttttttttgagatggagtctcactctgtcgcccaggctggagtgcaatggcatgttctcagctcactgcaccctccgcctcctgggttcaagtgattctcctgcctcagcctcctgaatagcagggattacaggcacctgtcaccatgcctggctatttttttttttttttttttttttgtatttttagtagagacagggtttcaccatgttggccagactggccttgaactcctgacctcaggtgatccacctgtcgtggactcccaaagtgctgggattacaggtgtgagccaccgtgcccagcccactttttgtcttatatactgtattttcattttaagtgtctttcagtattaaatctagaagttttccaagacttttcagtactaacccaagatagtgattcaggtttttacttaaatgcctacaaaaacagtatcctgaaaatgtcataagttgtaacattttttcttgcacagaatacagcaaaaacaaggatttgtttttgtctttgtatgtttcacaaagaaacttaaagtaatttaaaatacatttaatgaaatggagctgtttgtggaattggtaggcacaccaggaatagtttaacttgaaacaactatttctaaaggaagcaaaatacttggttagctacatggaaatagagaaaatatattaataataaagctatacatgtatgtatatatcttattttcctaatttttatgtacatgatttcattaaaaatttgtttccataagtatgtcttttagttatttatttatttagtttgagatggagtgtcactctgtccacccaagctggagtgcagtggcataatctcagctcaccgcaacctttgcctcctgggttcaagtgattctcctgcctcagcttcctgagtagctgagattacaagtgtgcaccactatgcccagctaattattgtatttttagtagacgtgggattttgccatgttgaccaggctggtctggaactgctgacctcaggtgatccacccgccttagcctcccaaagtgctgggaatacagatgtgagccactgtgcctagccaataagtatgtcttaatttgcctatctccatgtatttatagacatatgtaatatatatatatgtaaatattttttaccctatgtttggaggctttattgaagatgcatgttctctattaaaaatacttggctgcatgtggtggctcatggctgtaattctagcactttggaggccgaggctggcagatcaattgagcccgggagattgaggttgcagtgagccataatgatgccactgcactccagcctgggtgacagaatgagaacctgtctcaaaaaaaacccaaaaaacaaaacaaacccctttcatctgtgctttagtatcatttatgggttactatgatttttttccttacctcctttagaggcgggtgcttagatagtctaacactttgctgaacattttctggacagcatgagtgctttaaaaaattgtaactgtcttgctgccatgcaggcacccaggatgcagccaggtccttttgtgtaaggaaccgtaactgcagcgtgtcctccacttggcattgggactggcattaaaaatctgttttgcaaacaggagccagtcttttgattagcagggaggatgcctgcgagggacggaggccattgttccctgtgttaggcgttgttgctggttcagtttctaggcgagtgggggctgtctagaaggctcaccaggaaggcagctgggaaacttggttgcctgctggatgtggagccaggaccaaagccggcgactggggctattgcaatggatttccttccaaagggaggtcctccttctccctccctttccacggtcgagggagtagctctgtagctgggtttgccctccttctcctgctgcccgcctcctggttcgtatgcctctgctgcgttcgggtgcgagaactgccgtcatcctcctctccttgccgtgttgtgactggttcttcgttcgttttgtgctctcctgtcttgttgctttcctcgcctgtcatttcccatgtgcatttccgtgaagctgccctccgggactgcagccagaggcaggccaggcctgctgctccactcccctcccctcgttcattaccatccttggcttcattcacatgggagaaaagtatgaaccccattatttaggattgaattcactgtggagttgtgggtggggaaagtgctgaatttttgaaaacgccggttcagtgttgtgtgagctctgtgtttcctatttttatgttgcactctgttgatttttttcatctccctgaactgatctattaaaggaaatagattgataaatatcattttgactaaaaatatctatcgctgttggtgaagtgatggtttttttttacatacaatttttaagagctgtctttaagaggcttatgcatgtgcagatgcatgaacacacatgtacagtcttccttcctagaacatgcttcctcttagttttgggggatatctggcagtcctttcttccatgctgaggacaaaggtatccttgccatctccttgtgagatgtacatttaagtagactgatagaaagatgaacagatggatgaatggagaggaagactgaaggataagtagacaagtattttttaacctggttatttttggagaaaaaaataattcacttttggcttacatttggtctttttttttcttgttataaaatctgatcctcagtatagctctctataaaatgttaagatttcaatatttatataaacaatgaacacattcaactttcccccacctgcttcgttactctgcaaaacagatttgtagcagggagagggaagtcaacaaagttcatttccttcttggtagaataatcatatcaatgctaatttcttgaagaaattttttatattttcacgatgactctttccaggcctttgatgtttttccttctggtgatagaagcagtttaaggtttcatacctatgaagcatctgtttcataaatacattccctccccctccagtttggtttgtacgctagtctcaaataatcgactaaatgcttctcttagctttttttaatcaaaaaaatgtttaagcaaatatgtagactgtattgtactagtaactgctaatgtttgaaagactaaaagatactacaagataatttctcttccagacactgaacccaaaatggaatgaagaattttatttcagggtaagtttttcattgtttggtaataattgttattgatacgtctaggtcgattatcacagtcaattcatcttgaggaaaagctcttaaatttttaatgagaaattccttttaggatgaaaaataggtagcctcctaatgtgtcccaaattttgaaagactagaagtagtggtcacagaatccggacttgtttcattggggagtgttttggagaagtcaaaagaaaattatccaaacaccatgtttcatcttttgaattcaaacctttctttaagaaataagataaaatatcatttatgagaatggtttaattctatgagacgggttatgaaatattttagagagagtaaaacagtagaggcaacatgattaaaaagaaacataaaaattaccagttatattctagttagggaggaaaattttggtaactgaaacacttgagtgcatatatatgtgtataatataaaattacttctggaatctaaatacaacagaattaggtaagatttcctcaaccttttatatttaatatttagaatagctatatgtcgaaatgactgaaatatgtgaattagcagagatttctgcttattgagcatttgtggttgttgctgtgttttactactgacattttggaactattagactgcttagctatttaattgaaagaaaggactttctcttcaaaacgaaggtatcttaattgtatagctgtgatattaaaaactgcttacctccagaaataatccaggtcttctgattagtgcagatttccaaaggccagtattgccatgaggcccattataattggtcctgatttcttcctctcaatcgcaatagtattttttgtgctccaaacttgggctactacatacagcatctgctttccattatgctcagagctgaaatatggcactgatactttcatacttggtgaaatcctatgtacagcctccaccagatgtatttgaaattaccctgtggaggactgaaaagctaataggagctgatagatgctgttggcctttagttaactctgaaatatagctttccacttgtgaacctccaaagtgtttagactcctttcagtggaacactggcacagttacataaatgttagtacatcccatacttttttcagctaatcttggcagtaggcacatttaagttctatttttgttagtttttctgaaggttttttttgtttgtttgttttgttttgttttgttttttgagatggagtctcactctgtcaccaggctggagtgcagtggcacaatcttagctcactgcaacctctgcctcccaggttcaagtgattctcctgcctcaacctcctgagtagctgggactataggcccgtaccaccacgcctggctaatttttgtatttttagtagagatgaggtttcaccatgttggccaggctggtctcactctcctgacctcgtgatctgcccgccttggcctcccaaagttctgggattacaggttcttaaggtctttatatttattcattttacaaatctttattgagtgcctattatgtgccagctcctgcctgtagcctgtggttgcattggtaagcagtgtgacccttcatagagcttctaaacagatagcaaaccccatctgcttgttctgtcgctaggctgcaggcagaccacggaccagaagcacaagctgagctctctgtgcttgtatggtcaagtgttatttcatgcattccccaccatgaagcagccagggcctaggtcacctctctgctttaccatttagagcctttgtgaccctggaaaggccacctgaggactctcaatctccctgggatccttatctctcacataggagagagaatccttacctgcaagggttgtttcaaggatttgcatgcgatgatgtaaatgagaacatgtagctctatgtcacacatgtggttggtgcttagtaaatgatacctgagtttggaagatgatatgggccattttggtgaggttttggtaaggaaaaggaagcaaaaagatatggaaagcccagtagctctgtcattgcctcacagttccaggtctctctcatggttcacagtctaggctctggagacaggcagcatagacctagtgcaggtcctggttgccctacacattagctgtgggctcttgggcaagttacttcactgaacctcagggtctcggctcctcatttataaaattgcgtgatagttatacatcataggattgctgtgaagattaaaggagatcatgggttgttgatatttaataacaagacagtgcctaaaaagtaagtgcacaggctgggcacagtggctcatgcctgtaatcccagcactttgagaggccaaggcatgcagatagcttgagcccaggagttcaaaaccagcctggggaacatggtgaaacctcatctctacaaaaaaatacaaaaattagccaggcatggtagtccaagctactcaggagagtgaggcaggaggatcaattgagcctgggaggttgaggctgcagtgagccatgatcatgccactgcagtccagcctgggcaacagaacaagaccgtctgtctctgtctgtctgtctgtgtgtttgtgtgtatgtgtgtgtgtgtgtctctctctacacacacacacacacagatacattcttaagctattacaatcttcttcattatttttatcattactattactgctatcaggactaagaaatatcctcaggcatagacattttttgatctacagtcatgagaatgccttgtacagaggttaggaacccgtcaaagctatttacaactatcctttcttattttagaaaaacagctaagagccttctcttcttttgctatgcctaaatttggggcagaataatatagaaatcagtaataggaaatttgatttagtacacatagaattcccagaacagcaggataattgttcatattatacaattgagttgggcgcattgtaaagcagtatgttattctttctgttccttacgtcgctgttcaaatgattcctgctcgtttaaaaaatactatttatgttccttataggtaaacccatctaatcacagactcctatttgaagtatttgacgaaaatagactggtaagtggatgcctgtatttgaattttgcttcatttttttattaactggattttcagagcagcgtctttaaaactctgtgtttatgttgtacttaggacagtatatgtgcccaaaaagaagactgtttttgtcccactacgagtttgatgttcaaaatcctaacaaatagttttatgttgctaggataaaaaatgtatttgtatgtgtgtgtatttttattgcagttaatgttaacgaaagccactggtgatagtaccagcccatatgctcatgctctaatgttgggaatacagaacggtaggcagatctctaaagaggccatcaggaatgtaaacaaactttgctcggtttttaaatgaaagccagaccatagtactgggatgcattcagtagcaaatctatggtaattctctcagggaaaataacaatctaattaacaacgtatagcaaaaagtgaatctacatttagcaggtaaagtcaagccgtattttaaaagtggttgccttcttaagagagaaccttagaaagtacctttaaagaaacaaagatatgcctgaggcatataacagatacaaactaacattttatatatagattgatgtatatataatatgtttatgaagatcgacacatacataactgaaataattatgatttcattttattgtttttaattttttttagagagagggtctccctctgtcacccaggttggagtgcagtggtgcagtcgtagctcactgtaacctcaaacccttgggctcaagcaggactccaggatagctaggactacaggcatgagccaccatgcctggccagatttcattttagaaatggaatttttgaagcacattttgctttcttaactatctaaaacgtgtacatcaagtagctgtgaaccaggtgttccaactatgaaaatgaacactatcatgttaagtccttaaggtaccttcagaagtgacactataattcagtgcagtcattctcaaatttaccctctctgaaacttgtatggtatgttgactggttaaaaggtgttcttaagaatcctttctgcagtattcaattgaaactccagatttttaatagctggacgttaatagaatatttgaattggaggagccttatacaataactcatttaactcctgttgttgtcgatgagaagaaccaggtctagagcctttacataaacacatcagtcagtggaggtgccagggtctgacctgctggcctcctaagtcccagcccagtgatagtttgggaatgtattgaatctcatatgattagtattattctccaaaagagaaaactaacagattttggcctaccatcctagtatcttttccattaaagtatgggatgttgggtgatgaacagtcgtacagtgtaactaaaccacttttgttgtatgcatcaaagtactttcttgtgaaattggatgagagattctgctgagggtgcagttcttgtctctccatctctcatccagtgaggaccaagtgagttaagcagtattgagtagtataacagtacgttcctggagacatgggtgtgtctgtagactaatccttattctccaattattgagtataatatctcttgtttaacatgaggaaagggtcaaatttgaggaaaaatggcctcttgtttgatgtgttttagttcattattctcttctattaagagaaattcactgttaaaaaattgtttcccatttccgtatctgaaataatgactgtagttgaggtgatcttgccctgggtctgaaatcatacttccaaaccaaaaaggactttgaatacaaaacttttaagaaatcttgtatgaatacaagctatatctgaaaaattgtgttttataatattgatgcctagttttgccccaggccatctgcagtgtggttactatgcaaagaatgctggtgttgctgtttttttttttttctttgttggctattaacccagcggagacaatatgtggctatggtagtacttggaagttctagcattacacagactagcttccatttctctcatagaggtcatttttggcatttaaaacacatacttttagaaaacagatttggatgtatgtaaacacagggttaatccaccacactctggatgctagagctgttgacaaagtcatgctttgcagattttaaaataaactttttgttactcttacagcttggtattttcccctcctattttttttacctcctctaaataaacctctttgttaaataattgatgtttctggatcatagaaaatagtaagtttaaaatacagaatatttccaagctaactacaaatctgatgacagttttttgagtgtgcacttttccttttatttcttaggtcctttttggtcctttgcaaacatagtaagattccatatttgtgtcccaactgtggtaatattgctgacttcttactggaaaacagtcagctctaggtagcatttcttctgtgtggtatttaagttaaattattaccaaaaaaaaaaaaaaaagcccacatgcactcccttcttcaattttccttttgttttttgttgtttgtttgttttttggttgatgttttctttcctacctgacatatggaagacaatgttttctccagctgggttcattttctctttgaaaaggagacactttggtgtctgccagtcatatgtgagctacacacacgtatacaccttttaaatgaaaaatgctgtgatagcaggagggctctgcttggctaactggttgtgtagcaagtcgggccccctcccctccacttagctattttgttacttgtagatcctgctctaattatttagcattaaacggacactaactctgtagggtgtgtaatcgtatttatagtactgttttattagtttgcattccatcctggtagtgtagtgatgtcataaataacagaaacatggtatccgatgcttgggaaggggtttacccggtggccaagccatattttacttgtcattattccgtgtggcggaaggtgggaaaataccgtgtgtgctgttaaacatgccaggtccctgcactggttagacagagtctcagtgctgtgctccgttgggaaagaagtgccctgcgaatgtgatgtggtttagatttatagcagcgtggcttgcagtgtgtttgctgccttagtcagctgtgagagcgccctgctggggccactcctttctgatggaaaagcagcagctgggaaggtgctgtttcaggctcttgctgtttaaaaaaaaaaaaaaagagcgagtaggggaaaactcctctaagtccagaagctggcattggagggggagagcgcggtcatgtggttctggccaccctaccctctgtcacagtgtggatgagagctttttgctcttatccaatcatgcctggaatgccgcttgccacttgggttatttctgctatctgtcgctcccggtgccgcagtgctaacagtttggcagatgggacactttttcttggaatttgtgtctttggtttgtgacttctggcagtgtcgggcctgttgttgccgcttgccctagccctcctggcccccctggtcaccatggcccatcggcttcggtttcattttggctctggtcgcagcaacacagcccccgaatcagacatcctagaccaggagagagaagacgacttcttcatggcattccacaccctaccgcggagaagcagcccgcaccccttcgcccagaacggaggggaggacggcggcggaggcctgcagggaggcgtgggtgcgcttaagcggagctcgtccatgttcatcccgcagctcttgaccagcatcgacgcccgccccacgtgcagctcctccgtgcagatctccctgcagcgcaaggccacggacggggccacggacgggtgcgggccgcccgagggcgccgacgatgggcctccatgcgcaacgcccgaccccagggaccaggcctccgccactgccaccacgagggcctcgccccagagtggctcccgggagccctcgccgagggacacccccgggagctcccctccgagggcagcccgggacccagggctccaggtcaacggcacgtgcggccgccgcgtgcggtgctccggccccgtggactgcgcggaggaggctgccccgggcctgcgcatccagcaccgcgcctccagcgccgacgtgcgccaggtgaggctgctgcccctgggccccgatggccagggcggcccggccgcggcagagcccaggcgctggtccctgcagcacgttccagatgcttctggaagctctgggaagcggtgttttgtcttccagttgcagcagccccaacaaggcgcttcggggccaggcagcgacctcaactttggcttcacgggcacaaagggggacaggttggtgaggtatcctcgcattcggctggagaggagcacctcgtaccccacgcagccccgaagcgagcgagggagccccacggaagatcggggagccctggaggcatcgcctcgagctggcaggatggctcctgaaatccgcaggacgaactccgcggagaggactccgcagggccaggggtgcacatttaagatcaggcaggatcagaacgcggggcagcagcattttagaattcttgtaacccgggggccggaagaagctccccagaatcccgaggagaaaagcgccaaaagccctgtttccacgggagctgacaccacggtaagttcacagcgtgtttacatgtgtttactgatttcaacttcgatgcttactctgcggcgtaaccaaaataaaacctcaccctctgttccgggagtttccctgcttcaggccagtggatctgaatgtttggccgagttctggcacgatgatttgtggtccagtgtttggtgcgcaaaacaccatttctgcaaatgtcttctgtaggtcctcaaagtcaaagaactttgtctgtttgggaaatccaagcagaataccttccccctgcttttatttttctgaatagaagaatttcgaataaaatttgttactttaatctgccaaaaaacaagtcagtgccccaacgtgctgatgttggaattgcatttaaaaagctgcttgcaagtatagcctgtgacaatactttaaaaataatcagttctcggaaaggggaggatattgcaaaggacctcagtttcgtctcttaatagttaaaataggtgaacgtaaagtttagtggaatttgattatctgtcatggcctgtttgctgcaggaggtcaggtcagtcgttgttatataatttgctttgttttttgtcccattaagtaatactgaacgagagtagtgtcgcttgtgggatagtgacattactatcccacaagtgacactgctaagatactaacagatgcgtttttaaagcacattgggttatggcccaaggctaggggaaactgatggggactcgttaatggtcagatggcgtggcgtgcaatttaacactgcacacttgagtgtccaagccgaggatgctgtatatagaatagtaagtaccctgtctccagctgtggagaaatagacgccttagaacagattctggccttcctgtttctctgttcctgatcgctccctttcagtgaaatggagtacagagagacagctgcacgctccatcgaccaggcatatgatgactctgcagctttcgtggtttagagtggaatgaaaagtttaatcagtttggtttcttttactagtaatcactagccagtgagtgctttctcctaaagaacaagctccttatattttgaattggatattttttctcctgaatttcatgtgactgccagtttgaggatatgattagtaaatgtctaggggacttttctttggatttcacttatgaattgtgattttgaaaagtgagcgtctgagtattactctagaattgtattgtcttttattgctttgtgttcagaaataagtttcgtctttcaagtaaactttatcactcctccatcattggttttcatcattttgaagatacaatcagatgcttaatgaaaatttatttttcttcttctctttccttccatgtatctcctttctttcattatctcaaactcttctattgggaaatggctaagtgctttgtcttggtctgaacctataccatgtattacacaatggtacaaattttgacagtgttttgatattatagtagcctttaacgcccacccccaacaaattaccatcatgacagttgtaggctttgttcggcaacacaattccatgctgaacttggaccacttaccgcatgaagattgacaaaaatatatttcctaaagtttgataactattcaattatattaccaaaaactgaaatcactttgcagttctgatgtggaagacaaagggattcatacaattaaactcaaaaaagttcaaactcatttggtttgaactttcaaatgtaattagaaaacaaatcgaataaactaaaacttatgtgtaccttgcttaaaagggctattctaacttgcaaggcctatgtagtgaaaaacaagtttctacacatttggagaatataaattctggaataaagagcttttcttggagagtaagttccaactagtgaacagtagtttgcattttcatatgtatgtatttttgtacacatacataaattagtacgtggttagtaagctggttttcttttaagcaaaacgatttttctttaaaaaacaaaaccaaaagtggtcacataacaaaaccgcctgctccattcagcaactttgtatgcatttcatatggacaggggtgttaagtttaggcagcagctgccaccgccttacttatcttgaaggaaaacattcacttgggcgtctacagtctggctgctaccaagcttttttggcgtttcaaatatccactgctttggtctaaaggacattacattattaagtttacatgaaaaattagctagaatctgttgcagtttggtggtggaatgatacggaaagtcttcctagatttgggaataccgctcgggattcatttgacaacgtgctcatatttcataagctatactttagaccttattacaagattaagttgttgagtacttttatctgtgcctcccaaacatcctgccatgactaaatctaaaatgtaacatgactccaaaaaatgttaaccaactaaattattagaaaaaatacaggggaaacccttgtgatgataagttttccacctggtttatcactgtcagtagacaagaattcattcgtatagtcatcaattataatcagttaaaaattttcagaattgttagaatttaccaattcagtctgtggcagtcattagtagtcatttagtgagtaatttagttattttcttataaattagcttttgggttattgggttctgagcctcttaactgcattagagttattctgaggaagttggaccaccatttaccagcatttgtgccccctttgtatgccattttgtgcataataactgtgaaactctgcattttacaagcttgaggagccagttttctaatctcattggtgttatgaagtactcaaggtctactgtgtatataacattacacccgttacttggaaagtttcagggactatctcagtgtcttgctgacacagtttgtaatgtaaacggagggaggagggcccacccggacaaaagcagtaattctaacacctactgcatatgctattggagaagagagcgttctttcagctcaagctctctggactttcctctgtgtcctctcagtggacatgtacttcacaggagtagtgtagtaatctcttgtgattaaaaattacttttattgaacaacaaaggaatatccaaattcttttcatttggggaaactttgagtctcttttacagaagatgtttttaatatacggccattttttgacattaatattagtcgatgtctgttttttaccctaaaaataactcgagtatccaatgtattaaccacccctttattttaaaacataacaacacaggaggcgaaggtgggaggattgcttgagcccagtagtttgagattactgtttctaccactgctctacagcctgggcagcagaacgagactttgtctcaaaaaaataaaaataaaacttaatattgtaatggagaagaaaaacaagtagcattcttttcattgacctggtttctgactggattcaatcaactttctttcttctctcatgtatagtaatgctctctcttaatgtggtcttagaataaaccaatatatatcttcaaatgtcacctgttttcagggatgttttgaaaagttggataggcagtgcacaaggttgacaccgatatgtttgtaaacagaaactgtacatggcttgcagcatagctcatgtttctgtagcacttcacaatttgaagaatgctttgtttatttcacttaatatgtatggctgtcccattgtggaggcattatctcacttgaccctcccatgtgaaatggtgttatttcactgtttcagatgaaaggatgtgataccgttgttaggtgtaataacattatgtgtatatcatagtgtatactatgataccactttgtgcacctataatgggaatgtgtatttatgtgtgtgtgtatatttgcacaattaaaaagtatatgttaagccaaaaagcagtttaatgcttcctgtgatgtgacagtttttttgaaaagtttagaggtggtaacttcatttggtgtcttgcagcactggcctgaaggtgagagaaggcttctttggggatccaaagagccgtcctctgcagttcactagcttttggtcctggagtacttagactccctctctaagcctattcctcatcagtaaatttgaggataaaaatgtccagctcgtaggttcatagttaggtttaaatgaaagtgtccatggaagtacctgattcgtgaaccaggtatctgtaatatacaagtctttcccctagcaggttaattaggttaattgtgaacaaccattttttgatcagtatggcatttaacacaaggacaacatgcatttatggcatacctggaaatgtttaataaatagctttgatgctctttctgttgtcatctcatctttcctaagtatttgtccctaacaccaaatacagtcttggaaaagaattgcttcctgaactatgcattatagaaaaggactcgtaagtatatttactgtgttgattttgaagccttataacattttggcttgcatttctagcatattttttaccatgtcattttgctgtaatatttccagtggttgagtctactgttactttggtatagactgaggcttttgagaaacaatatagtgttatatctacaaaatttccacattgtatgactttaaaatgagggagatatttgggaatatgtcttattttaagatactgtcttttagagagttttcataaatggtgcagctgcttctcttggctaagcctggtggcagaattcctagtcattgaaataaatctctaattttataatacatactgataagaaacttgctatcttttcataaaagttcacagtaccagaataaatttactttatgtaaaaactaccttaaaatgtaataaatgttggatagttgaatggtttctggatagttgatgaatatttctgtatagttgaggcgaatctaaatggtaatgctacttgtgcaactgtcaatgatctagcacattttttaataaaaataattacctgcatattactgtgggcgatacaggttagctatcctaaatacgtttttacctttttaactcttaattatattaagccatttgcaagaatgggaaaaagcaggaaattcataggtggtgttgaaattgctgattctacacaaaggtaccagaatgtctacatttcctctgtaaatgtcaaaggaaactttggaaacccacctcagagttggctggtgattattcggacaggttatcatcctgtctgcaaccttctagttctcttagttcataccaagcagcatgatattccatgtcctgcacaaaggagagcaccaaaacagccttcacctgctgcgtatgccccactctgaataaaaaattaagaaggccaaaggacggaatgtgttaaatattagcaaaagcaggtattgcagaatgtctatacatttctgggcaggtggagattattgaaagatttttagaaataatcttcgttcaccacattccagtgccaggccctggacttctgtctctatttgtgataaaatgtttttaagaaatgctggctgggcacggaggctcatgtctgtaatcccagcacttccagaggctgaggcaggtagatcccttgagcccaggacttcgagaccagcctgagcaacatggcgaagcctcatctctacaaaaaatacaaaagctagccaggcgtggtggcctctgtctgtagtcccagcttcttgagaggctgaggtgggaggatctcttgaacccgggaggcggaggttgcagtgagctgagatcgtgccactgcactccagcctgggcgacagagtgaaactctgtctcaggaaaaaaaaaaaaaaaaggaaaagaaataatcttctctcagtgagcatgttgaatgcataatgttctcactggagttctcctttggaatctcttgattattctgctgtggcttccttgggccaactaggatacagaggagaataaatgagtaactcagtgagacaggtggcctgatgtgagtgggcctgaaagttagcccctgatgtcctggctggtttcatgccatgtcctaaacgggcactttcctggtctctaggcatcaccatgttttgacaggaagcttagtttctttcaggatggaggatggaatcaattgtatttcaagaagcctgttttttatgccctgacaattttagaactgtggactgttctgacacttttgagtacagtgattaaatctctgtgaagggacaggtcatgaaatcaaataaaaggacggatcataattgagctggaagggggccctcctatctctgatttgactcgttgctacactttagtattcggaaactttgtattggttcccttaagtgcctgcacaacctccctatttctggaaaccattcagtgtttgttttaatgttaagcattatgccacgtatccagtaagcagagcagagtaaattcctccaggtagcaagagactggaatttcccccaggcagatcagcttttcacaggttcctagagtttacacagccttcttttgtgacttaatttttgtagatcacagtgagtcaagtgacttttacttccctgtataataactttgaggagcctacttgcaacccacatcatcactcattatcttgcttacttctttcttgggggttagatgggctggggttgttattaagcatgttaaatactttgaaattcaaatcgtttctgatagatttagtttctctttcttctattggtcattcgagagctggtagacttttaaaatacatttaatgactcacacatgtcataactcatccatttccttgacattttcaagcgtgataataaatcctacttcttaggcttttttttttttttttttctctctctcatgttcttttcaaatgcatggctaggtagttacctcatgaaggaaaacaactgttttggtccagattttaaaaattgagttgaatagaaaaggtggggtggaaccagcaatactgaaatgtaataatgtatattaagctccaaccaaacaatccagcacttcttcaaatccaggaggtcttctggctaggagttacattgcagaactaacatggactcttaaactttgtaaggaattagtcacagttgaacactggaaactatcagcatacctctgggcttcttttatatggtcttcctcatgagttaaaatgccttaagcatagtatctgttccataggaccttactgattatgcttttccacttgaataaaagagatattaagttgtaataaaactttaaatattttaatttagtttgaatatttaagttgaattaacctcttactacagtaattatcttttttgctaacttcttactacggtaattatctgcttttataaaatccagaaacgatgttatacacattagcacgcattattaggtgcccaaatgccaaggctaaggacacagcaatgctaaggacacagtgtgcctccggcctgcttgcaccctcggttgaaattatattagcaagagaagctcctgcattctgcagtatggcatttttctccagctaatgtatgcaggggtcatttttaaatgttagattcacagatttgcagagctgtgagttgccttggaaattatgctggccagttcctttaattttaaagatgaggaaagtgagaactttcctttttaaaaattgatacataatagttgtacctgtttatgggggtacatgtgatatcttgtacctgtttatgggggtacatgtgatatcttgttaacatgcatacagtgtgtaatgatcaaatcattacatactgaaatatttgaaatatctgtcactgcagacatttgtggcatctgtgtgttaagaacatcccaaatcttgtcttctggctgttttgaaatgtatagtaacttcttattaactgtcgtgctgaggacatggactactgtgctgttgaacactagaacttactccttcatctgaccgtattttcgtacccatttaccaaccctgagagctttacttttgcagtaatagagaatattctttttctctcttgagtatgaaataattatttttgaataatcactgcacgtgaagccctatccttcttgacgttggacatataaatacttagggagcttggtttatagagctttcagtttcacaaacagatgggacagctgaggtgaggcctgcctagcagaagaagccttactcctgatagcaggcactaagcaaggcattgggtgacagattgcttatgcacaggctgggagggacaggaactgtgtcatggaggggcaagactggaactagatgctgaaaagtgaccagatttgtctcagtgggccagtgggaggggcctcattgaaagactgaaggtagatgtgcctcccagggatgtggtggtcatattggctccaaattgccttgttcattattagcaggtttcagcaaattatttttcatgtgaaacgttgctgaagatttcttgggtgtggctgtcatcacaaacaattcctctcttttccatcaaatgtggagttggatgaattccttccttgctggcctgccttccacaaagctgctctctgaacacctgccaggccatgctgaggacaaggaaataccaaggcacagtttctgccatttaatggtggtagcagagacccaggaatgcaatggattattgtcactttcattataacatcatagtgtaggatcataactggaacagagaggatgaagctttcttttggggaattgagggagggagacagggtcttgctctgttgcccaggctggagtacggtggcgttaagatggctcactgccacctccacctcccaggctcaagtgatcctcccacctcagactcccaagtagctggaccacaggtacatgtcaacacacgcagctaattttttagtttttgtagagatgggggtcttactatgttgcccaggctggtctcaaacccctggcctcaagcagtcctcctgccttggcctcccaaagtgctgggtttacaggcatgagacactgtatccaactaagtaggctttatttatggagtttataaagaaactgtttatatatacaggggagaatttatcctgaagaaaaactaaagaaatgaatattttaaatacgtctctgcatttctttttgttggatatgacatttatgtaagaaaaatgctaatctgtatgatatgagacatgttaactacatatggtacatgtatttaaatatcatatgtatttagatttagcaacaaaaagggaaatataaaccatatttccaccatttgaacaaatcgtattcaattatatgtgcatataaccatttgaaaaaattataatgttgatcggatctgcaacctaaaccaagtgccaaattaaattcaggatagataatttcatataaaatgtttcacatcatagaaaaagcagtgaaaattgagtatcagatctgtgaaggatgatacatttctaaccttagaagcagaaaaggaaatcacagaagttggatagattcagccatataaaagtattaaatttctgaaccatgaaaaaaataactaaaatgagggaaacaccagatgtttttcttagtgattcatgtaagttctcatatgtatatcttttcagtgtctaattatgtgcatattttggccagtgggtttgtatctctgtagaaagttctagtaaatactggagaaatactgaggttcccccactccagctctttcactccattgcaaagtaggtcttgtaggtgaatcacacaaacggattaacaagaaagacagaaatgtccagctcccaggttcttcattatgctgttgtgttgtgccaatagaaaatacaatatatcaaattggagaacttgtggttgaaaataatatacgcagattgctggtggcagtattcatggatgtgactttggagtgatttttaaacacttaagtatttttaaatgataagaccaattataggtactaagagtcttgtgttttgaagtgttggagttaatccagataaagttacaaatctaagcagacaccttattaagagatcattattctctgcttttaaagtggacttgctttctatatagttatgaagaacagatagaaatgttttaagattactggctactattaaaataatctggtgactgcagttatatctgggtctaaggcattagactttttggaaaatggatgcttttaatctttccttccgtatatttgtcacccagaattttaaaatttggaaatttcattcattcagtccagatagagaattgatcaattggcaattttattatttttcgctcatgaaaaactctagggttacaagaatatgctcctgaagttaacatagttacttttaaaatgtctcaattctaatggttaggtattagtcctctgagttccggttgccccttaacttggatcttaatttacagtttacagaaaattgttcatatttcatattttaagatcatgtactctaaaaccctattatacttgaaatgaagacctgttatgttatactagaatctctcatgaaaatgtaacagttcccaaggaactttgtttctgtctccatggaccacactggctactgtactggatggagggcaaggcgggagctgagaggcctttgcagaagtgcatgtcgccttagtatgtggcagatcctggtccctggcctgtgctgtttccctccacaccctttgatttctccgaataccaggaaagatcatggattgtctcgggagttagtctcccccttagtacttagcctgtcattttcatgttgcaatgcctagaaaatgggaggtttttcttctccttaaggaagtgttatttcaagatgctttctgctgcctgtgtcatgccagggcgtgggtggatatatttttgcacttttgcaccagcgagtctgcttctgatttgcagattgcatttattataaggcgtattgtccattgatgaataatgtgtgggcattaaagcaaagctgatacatagcttttaaaatagctcatttatcctgcaagcttcacccccatagagaggcaggcccttcagaagcgttttccaggagcaaggtttctgcatgtttccctcagttttggaggtcgtcgttttttgcccctactgtgggggccaagggaaaattgctctgcgccttctgatggtcccctgaaaaatcaactgtcaaaagcccaattaataggagaaatgccatacaactttattaacgtgcatgcagattgattaccccaaccccccaatggggttcagaagcttctataccatcctgaggttataggaagaatggggctcagagcccgaccaaaaacagggtatggtggtcaatcaggttatggtggcaagaaagattcttggagggagagaagaggaggcctggctagcagaggtggccctgtcgtgtagatgaaacctcctaggtagcagccctcacagagaaggcagatgtttctttcagacctttaaagatgtcagactctcagtcaatcttccctagatctggacaagggagggccttagagaaagatggcctcccatcagtgcagtttcctccccaggtgcaaatctccccccacagacctgccctctgaacagccattcacagtgtatcaaagaggtatattttggggtgaaatatttttattcccttcacccctagtttatcatgtgtttccttgatgggctgagggcttgacagatgagcagatagacacaatcttagttcatggaaaaggcaagaatagagatgggtagcggagagtttttaagttgctgctgatgaaatagacactcctttgtctcagctactgaaaattttctttagaacgtggatttaaataaagaaagaaatagacatcatgctttgtaatgaagtcctttggtcatcgtaagtggtcacagccagtttatcctcaggcttctttaagctgaccagttaaggtttctgcagaggttctgtgtttgagggaggagaggaagtccttggggaggaggggagcgttctatgggagacagtgctcttgggagcattctttcaatctgatacccatgcaagggtgatgacaaggtatggccttcagtgactcagagcctcctcccttcccaagcctcaggcctgaaagtctggtgatcctccctggcagaaacctcactggggatcattttttccttttgaacaagtttcttactttgcctcatatgttccaatcttctgtcagtggccaggtgacatctgttggaatgctgatgtgtgttgccaagcaaaacagatgcaggaagacttgcccaaagtgggggaagagagggaggaaagggaggaaaagtgggaggtagagtgtgttagctggggagatgggatcgagcagtatttatctatagaacagatatcaaagattgggtaaatcatggcttaaaactctcagaaaagcattctaggttcttgcacatctttgcaaggctactgaatggctcatttttatttcccaccctgcattcagagtggtgtttaaatggctcaccgcagcaaaaaggattaggtattacccttgtgctcaacacaagtctgtggtcagcagatttttaactttatcctagtttattgatatttctgtcagtgaacaggtttaactcttaatggaatagaatctaccaagaataatgcagactggataaaaagaatttcactgattttgattatttagcacattaaaggggacccctggccagaagtagatgtattgcttgggagaggagggcatagtacccaggtggtacttcagggattctgattttcagtcagggttgagaaaaactgatttaagaagttaatgctactgacagcctaaatctgggtttccttgataacctttggtgtaaatactgatttaatgcatttttttttctcacccacttttccttcatcaccccaaatctatattgtgttcacatggttcctctttctagaggtgggagatgtccttttatggctcagaggtccacaaaataaacttgcattcaagcaaggttgtaaaatacctatgcattaagagcagtccagttgaatatttgcaaagcatatataaaagagcttctctcctaaaataactgaaatgaaaggattaattttctctcagtttcctactgcaagaagtaagtaaaagtggaattccaattctagccatggcaagaccggtctatcctgttatgtcttgtgtgccaataccacttttctccaggtaactaaagtatctccctgctgtaaatattaactgagtgcatttttgtggcttttgataactccacgtcttgaaagtgttggccagttgtcaaattttcatgaatttcagagaagtgggtaataggtggtttctctcacggtatttaaagcgaagtagtaaagaggaaaaagactgaaaaggtaacctgggtcaactcattttttagggcgcacagaagtgtggtagcggagcctggacatcaggtggcctgaagcccaaaccaccagctcccccagcacaggagagtgcaaactgtagctcagtcttggccatctggggtcttctgcaaatgaactgcccatagtctggccaataattcacactgttgtattgctgtctttcattctctcttaagtagagcgttctgaacatatctgaacaattttttgacacgctgttactctcctagccacaggttattttatgacctagtcattctttacataaataaacatttatcaacagtgctgtctgggcctagtaaggtatatagcctgctttgtttctgcattaaagttcttagaccgccatgatcttgagatgtttgctgcttattgtttctttctgatttctattgcttatcagttactactacttgtggctccaaggatagaggccgattccctcttctaatttgctgcctctcatctgcttgaagtttaggtgtttagtcaagctcactagcattgtttataaaggaagaataaataggttgagagtgaggacttagggtagttacctttttaataatgtatatgatctgtctttggtctttctccctcatatctctgctgattttactctcgtcctcctggaacgtctctggaatcagatagatttttgtaagatttggatgtaagaattcagtggaataatatatactagctgtttagcctagtgctcggcacatattaatgcttaataaatattagctcttattattattgtttttttccctgaaagagaaaatcttaattcctcacagatgtttaggaattggatatgtagcaaccctatccactgaattagtatcagcaaacacatttttagttcatcttgatttttatcttcattgggattatgcctttatccctttagggttaatgaatttcctactgtgctgttatggaagaaccctgaaaaaaaaatcaataaaatgtatccttaaaaaagattttatgattcacttgactaccaggtgtcagcaacttttatttttattactttaagttagaaggactttgaaggttttcgtggtttattctcttcttttttaaaggccaaaccaagatcactttttggtaatggctacctttcctctgaatgtatttctcaaaaagttctttctggtttttattaaacccaaacagttgttataatttaaaagttacccttttagagtgagattagctagaaaagaaattaaggattattttaagtaactcagcaagtaaccttttccaagaagcttagattataaattaacgaaaaccaaattataaaccaaggtgtatggttgattgtgggttaagaattttatcagcagttttgctgttgtatgtaccagtcgtatattttactactgagtagaagaaaagtctaaaaatcaagtgagtagtttttccttagctggttatcatgtttgtttgatcattatattaaagtgctccttttatttttcgttttgtatgttttcccaacttaataatgaatgtgcttctctctaatctaatctctgaatttcaggagtctattaataaagtatgtgtaaagaattagttgctaattttggatgtggctgaaatgagattgtcagcaaattacaacttcaagcctaggactgcagtgttatggattgcacctcatccttggttattgaagatatattcaaaatttatgaaaaatagaaaaaccttattacttctgaatttttccacgttagactttccttatacttttaagatagtgaaagtgttattatataagatcatggaaagtttgtctttccagacctattttatgttaggattttacaatattaaattcataagataatagtagagactagaaaacaaatccttactgataatgaatttcctaagtagtaaatacaaatgaatatttatttgtaaacctgggtgattaagtaatagctgttcagtgatattgatggaaggaaattaatattatttaatccaaaggccaggcgtagtgactcacacctgtaatcccagcgctttgagaggccgaggcagatagatcgtttaagctcaggaattcaagaccagtctgggcaacatggcaaaaccttgtctctccaaaaaaatgcacaaattggccggtatgtgcctgtagtcccagctattcgggaggtaggaggtaggaggatcacctgagcttggggaaactgaggctgctgtgagctgtgattacaccactatactccagcctgggtgacagagcgagaccctgtctcaaagaaaaaaaaaaaaaattaatcccgaccttcctccaaaaaagaataaattaagtccagaaagtttggtgattcacttgctgttgccgcctttataaacataaaagtcagtaaggctaagggacacttctgaattccttctgctgtccaggtactgtgccgagttctagagatgcaagtagtacataagacagatgtggcccctgcccttgtggagactgcagaccatggctctttttcatgaatggtagagacactcataagtcaaatacctacatattttcatgaatgtgccaaaggaggcaaacaggaagctgagacaggaaatcatggggaggcctacttgaagagaggtaaggaaacccccaactcaggagtggcctgtaagctgaggcctgggaaggacccctgtgggcatggccagtggaactgcagcggaagcagccgttcgcccaaaggtcctgcgctgggaagagagtcagagatgctggaggatcagaaagggatcatccaagtgagtggaggagacagtggtccaggatgagcttaggggaaaacaggggcccctggattgttcacgctgtagaacacagtcatgcatctgatatataaatagcatggagataccctcagtagatgcaaaactcaaatgagctcagctgctctgaagcctgggaaaagtcagcaatttgtaaaattatgacacatccacattttcacaggaaaaacaaagactagtatgtaacatctcctttggtatttacagaggatctctctctctctcgttgttactcttacaaatgataggaggccacttttgttttccaaattctgtgccagatatcttgcctttcctgagatatagacacggtagagtcaggagtgtgtgtgagggcttgcagacttctttttatgtctttagaatccttcttcacttttgaatcatttggtccaggagtttaaggccttttcatttggcttttgttgttcatttgttgaacataaataactgtgttcattatgcagacaccgtgtcattgttgacaatttggtgttgtagattaaggcaacgtgaccatgtaacaagttgggcaaatgcacttatccattcagtgagctctaacctacaaggtgttttgcttcagaccaaaatggtagactgcagaaccttcggcgcggattttaagtccatctttaaaaccataggtagagattgtatctgtgtgttcttctttaattaaaaatgggaaaatgatgcgacagagcaaagacggccatggatcctttttatccctctcccatccacacagagagtttatttcccctcccctggagtccaggctggccttggggttgccctgaagtgatgccgggccctttctacacgtagcctttcaaaggaccggcagcttccacttcctgccttttggaaaagcttgctttagggatccagctgccacctaaaggccctgaagtgagccacgtagagagaagttccagctttctagcccatctccaagtgtcaggcaggtgagtgaagccatcttggatgctccagcccatcaccatccaactatagtcacataagaggccactgatgggcccagtccgtctccacactcctgagagttagtaagtggctgtcgtgttgggctctgaagttgtagactagtttgttagtgacgtataaccaaaagagagagtgtacttaacatttagtcctgggaggttcgaactttgcctccgcctgtacgtgagctccctggagtgtgggatgaaggagtgcttggcccagttgttttcccggaagctggaggagggcagccatgcacaggttgtgtagaccaaacagttcagggatgcacttggcttagacagctgataaacagctgcagtgcccccaagggagttgaaagagtgggtattttgttgtcaggagtagaattattcaccttgaagaacagaagatttgtagtttaaggaaattcaccatattcttaaaagttgcagaaagagaagagttcttagcctaggcctgcaccaagatccagttcttttgaatctgatttaataggcagatgatgaaggacttattcccaataataaagaatagttcaataggaggttggtagtcttaattgtcttccttgtcaaatcctagtgaatttcacatcagatactgtgccctgtgaggctctatcaccttagcacttggtaatacgttttttatgtagtaggtgctcaataaatgggttgagtttctataataatttgatttctgtagcatctgatttaactaagtttgctataaaacgaaatctgctattgtattcaacatcacaataagcagtatcagttgtaaatcatacctacatacagttaacccttgaacaaagtggaggttggggtgtcagcatcttaacacatagttgaaaatcttttgactcccccacaatttaactagtaatagcctactgttgacagaagccttactgataacttaaacagttgattagcatatatattttatgttataaaaattaaatactgtgttctcataattaaactagagaaaacgttaaaaatcataagagaaaatatatttgctatttattaagtggaaatggatcattgtaaagtctacatcctcactgtcctcacattgagtaagctgaggaggaagaggaggggttggtcttgctgtcacaggtgacagaggtagaaaatccttgtataataagtgagctcatgcagctcaaacccatcttgttcaagggtcaactgtacttgaatggatttttttccctgtcataattaaccacccacacacatcttactagaccaaaaaagaaaacttgtcaagcaaataatctcccatttcttgggtcatttggagagataacacaggccaggttatatgtcctgaaagatgagaatgtgtgaagtccccagagagtctgatacgaggccttcttccagggagtagtggtctggccgctgcaccagcctgccccctgccatgccctgactcacctgcacatcatgggtgctgctgatgcccaggcttcatggctgagcatggcacccttagcacccctcacctgttacccaacggagatttgtgggtcggaggcatttcaattggagaaggatggaatggctgagggcaggaaaacttaacaagcaggaagtctgcaccctggctgcacatgagaatcccctatgggcattgaaagtagggggagcattgaaggtagggggagcattgaaggtagggagcagtcaggtcccatttcctaagcggctctgcaggcctctaagcttgtcagtcatctttttggtgctgtgtggactagtgccagcaggaacaactggatagttttaagtctttggcctcttctgacactttttaaaccaaacattttattaaattctcattcaagttaatagcaaaaaaatattactactggtttcatgtttaggtctcatttgcagtttttaaaacaacctaacggagtatagtaaatacataaagtactcgatttaatgtgcattttctttttcgttttttttttttttttttgggtggggaggggggtggttttctgagacggagtctcactctgttgcccaggctggagctatctcagctcactgcaagctctgcctcccaggttcaagtgattctcctgcctcagcctcctgagtagctgggaatacaggcacatgccaccacacctagctaatttttgtatttttggtagagatgagttttcgccatgttggccaggctggtcttgaactcctgacctcgggtaatctgcccacctcggcctttcaaagtgctggaattacaggcgtgagccaccgtgcccagccctagtgttcattttctgacaagttctatgaaacctggtgacttaacttttctgaatctgtttccctatttgtaaaatgacaatacttgcagtagagtttatgtaaggaattaatgagggtaactttaagatctttgtaaatgctaatgtgttttacaattgtggtcagctataataataataataatattattattattattattaataaaatgcttactaggcgaagttaatagctcccacccattcccaaactacttaaggaggattttaagctggaaacagttaaggaaagccgcatgatgccatgagcaaagccttccatctgcacttggcatattgcagggtctgtagttgctggaatgcctatgtccctggttacgagccttgatataattgtgctaaggcattttggtggagtggaccgtgtcctgctgttgatcaaacatttctgtgtggagagactttgtttttcccttggggagtatttattttttagtgccaggctccgggttggctgtgctacgcttggcttttcagtgccaggcatacaaccatgtcagaagggggactgcatggtaggtctcaggaagaagggccgaggaagaggagaaaagggacttggctgtggacggggaatcctgtgtatcttggcttctctgagccagctgtgcctcagaactttgatttgatctttgtaccccatgggtcctgccaggtgaggggcacaatggagaagagaaaaaaaaaaatgctctgctgaaaacataagcaacaaataaaatagaggatagtaatcctaggataatccccgaggcagcagagaaaggcaggctctggcttgcatgtcaggagctctcttcctgggggcaggagggagggtggtatagtcccagatgagtgcttggcaggttgtttagagcctggtagcagtgaaaagaaatgtctaccaggcatcttgtgcatgtggtagatcttgacttgtaattgtggcagtctcccctaggctcctcggcagctaggtgacagttgcctgctagttcatgggtcaccttctcaccctctggcttgcttctcagtgggtgtaaatggggtaattaaaacctgtggttttagactttgctccaaagactgtttctggggttctgcagacattgacctgaaatttatttttattatttttaacgtttaccacctgtgaagatactgtacatttaaagatataaaatgtatcatattaaaataaaatagcctgtatgttttacattttgagattctgtttatgctgtttttttaaaaagttagaaatgtattggcatgttctgatagcttatttttaactacttctccattgttgtaatatcataacaggttggactggctaggctatggtcagaaattgcttatcagtgttttatacatacccaagggattccaacacagggtgtccatggtcctctttgagaaaactttgtctaaaagatattgaatgatgcctcattaaaaactcctcagaaatattttctcctggcttgttttcgccttccgtgtcattgtttgagaaatatccaagattccttcttttttacaattaaaaaaaaaaattgaagcaagtccataatcccatgtagttctttgatagaattaaacttcagataggcataagaaattcagataggctttctctccactggaaatgcatgcctttcgcaatcaacagtgtatgatgtggtctgttctggagttggggtctgacccttcagcatggccagcgctatctgaagatcagaaaccctggaagccccttgtctctttttcatcttccacatctgtctggcgtccaggccctgcccctcctgcctcttcactgccactgctgtggccagcctcttattcagaggagtttcctacctggttagacacttaaccacctccagacggaccccttctaatccacgtcccacattatagctcaaaagtatggattttacagatcttatcctctcctgttctgccaaaaccccatacggtcctccattaccaatcaggtgaatcgacttgcatttcccagcgtgtccccacacccacaaacactccatgacactgggcccgtccctgcctttattccctgtggcccctgtgtgcaggagccttccctcccctttctatcagtccctcatgtacaggccttcagccccctcactctgccctgttcctacctccatcattgtgccatttatgtttgcatgtctgtcttctctgtcatatctatctcaaactaggttgaaaattttttgaagatggagattttcagaataaaattgttcacacagttatatatttgactgattatacttttatttttatttatttattttttttgggatagagtctcactctgtcacccaggctggagtgcagtggtgcagtctcagctcactgccacctctgcctcccaggttcaagtgattctcctgcctcagcctcccaagtagccgggattataggcatgtgccaccacatccagctaatttttttttttttattatagtagagatggggttttgctgtgttggccaggctggtctcaaacgcctggcctcaagtgatccgcccaccttggcctcccaaagtgctgggattacaggcatgatccaccatgcctggccgattatacttttttaatgtgttagttaagatgagagagtccaaagtgatacagcccctgcccccacagagcttccagtctagtgagagaggcaggtaccaaaaagataatgcacatgacagaatggactgaactaagtagtagtagaagttcaaacgaagaagaagacacaaatggataaaagctatggattctcaggattgaggatgctgaaaggctgcacaggatgaaaggtgcgaccaagggtcctgaaaaaggcataggatttatacttgcaaaggagggcatttccagcaagaaggcttggaaatgagaaaatctcgggagaataggcccatgttagaaattcggtacacgattgagaggaaaagaagtgccactggggaagtgtgttgaagcaggtatgtggatgttcttccctatgcagtggtgtcagtaggattttttgttggtgtgagatctgggatctgtttgtaagccgtctgagagctgggactttgcattgatcaactttttgttgcacatgctctgtgatgtaattggcactgcatgatttgacaagaatgtgttttatgctctaaatcaggagtgagcaaactttctgtaaaaggccagatagtaaatattgtggcctctatttagtccattctgaatgtacattagacacaagtttctaaagtacattcacaaataagcattatacacttagttgtaacatacacggatgttgagcagagaaaaagctctctgatttttgtggttcctgctctaagccaggctaagtggtgttgtcagggttccaaccccttccatccctgaagcacactcagcaaaccatctagtttataagccacagtgtgctagtaggtgctgtgtgtatttttttgcggggggaggaggtatttattttgtttttgagatggggtctcactgtgtttcccgggctggtctcaaactcctgggctcaagtgatccttctgcctcggcctcctgagcagccactgcacgtggctgcatcgcttttaaaggtagatgatgcctctggcctttctcattgcctctgggtgtgtggcccatgtcactgtccagcgcattccactgtccagcccattccactgtctggccccatgccactgtccagcccatgccactatctgtgtgttccgtgccactgtccatctgtgtagggaagagagcaccaggggctggcctggtcaggagagctttctgggcaggggttgagggaggcacatgtgagctggactttgaataaaaagaaaggaaagccaaggagcagaccgggcgaggctgggtgcgaagaccagatgtggcagggatttaggaggcagagcgagcacaagtctgtgcatattggtaggttctgtagacttgtcggttgtgcagtggattcatggagcctgtcgaggaagctacctgtgtgcttccactaggaaagcacagccacagagagaagatgaggggcagggaagcagtattgtggggaattcggagtgagggctgaatctgagaaatattattttaaaattatgttaaatacattattttttgctgtctccaaccatcattactatgttcactgtagaaaaattaagaaagtcagtatggcatatagtcccataaccaagaaattcattcattgtgacctatttgagggtcatttaaaaatgactgatgtaatttggtaaaagattaatcaacaaaatgacttatttcataattaattactttccactaatgtgacatttctcaaactctgcagtatttccttttcttcttttcttttctttttttgtttcctgagacaaatctcactctgttgcccaggctggagtgcagtggcatgcaatcatggctcactgcagccttgaactcctgggctcaagcgatcctcccgcctcagcctcctgagtagcttggactacaggcatgcaccaccatacccagctaatcttttatttttttgtagagaaggtgtctcactatgttgcccaagcagatcttgaactcctgagctcaagcaatcatcctgccctggcctcccaaactgctgggattacaagtgtaagctgctgtaagctgctgtgcccagcctatattttcaagtctctctccttttttttttttttaaactggaaaggatagctgtgatggaaatggaagacttccaacagaataccttagttagcataactgtgtagtacaagatgtaaaaacctgttgaagtgggtggccttttgttatcattctgtctttctgcccaccctgtggcacagttctcaccatattttctgtcaactgctaccacatggtccccttctttatgttataaagtctcttaattattaggtaattattcattgtcctagctctccatgcttaccaaacaatattaacaagagcacggtattacaaatgagtcaataacaacttccctaaccttatggcagctgttttggaggaaaaagaaaaaagaaaaaaaaactgcctttttttttcttaatgcgttacaattggttgatcagaacagttttaaaactataaaatgttggctgggcgcggtggctcacacctgtgatcccagcactttgggaagccgagacgggcggatcacgaggtcaggagatcgagaccgtcctggctaacattgtggaagcccatctctactaaaaatacaaaaaattggccgggcgtggtggcagtcacctgtagtcccagctactcgggaggctgaggcaggagaatggcatgaacccgggaggcggagcttgcagtgagccgagatcgcgccactgcactccagcctgggcgacagagtgagactccgtctcacaaaaaaaaaaagcaaacaaaataactataaaatgtttaataaacatattttaaattaaaaggtaaggttgtatctagttatttatacagctatttttaaaagtcaggttggcaaaggtctctctgagtttcacaaaatatccgcgtgagtggtgcatagtttgtgctggcttatttccatttgttcgttgtgtttatggtaaccagtagcattttctaatttggttaaaatgctgtcattagctggtaaatgcagtcctgtcacctcagaggaggaccaagaaggagctctttctagaaagggagggatcgaattactcctcatcctcatatctacttatctatctgattttaagacaccactgaaatttatactgcgagcaatttaaatgaatgcagtaattgattgcaaaacatgtttgtaatatcagtgactgaaattaaataaaagataagtcagtactttttggatcaatccagttgatctaaaaataaaaagtagacatccactgaatggttgggtaaatgaacgaatgaattttggcttatgtcagtgaattggcctgactgggccttgatctacatagcttctcttgacattttgttgcccaaattgagtttgagtgtttttagtaggcagggtaaattagcggtatggatgggtataacattctacatttagttttgctactgtatatgagctcatgaaatggacttcccttccctaataatatagaaaaaagaaaaacctaaggaaatatagagaacacattcaatttgggaaattcccgtctgtatcagtcaaggataggctagatcatgttgatcatgctgcgtaacaaaccacatctcagtgaattaacccacaaagggggattttcttgctcacaatacacaatctgtgtcagcaggagagcagaattatctgtcgtcaccaagagtccccaggatgatgacggctaatcccattgtgccttcaccatcactgccataggtgaaaggaacgtgataaattgcacactgccttatttatttatttatttatttatttatttatttatttatttagagactgtgtctcgctctgtcgcccaggctggagcgcagtggtgcgatctcagctcactgcaacctccacttcccgggttcaagcgattctcctgccttagcctcctgagtagctgggattacaggtgcacgccaccacacctggctaatttctgtatttttagtagagacggggtttcaccatgttggtcaggctggtctcaaactcctgacctcaggtgatccacccgcctcggcctcccaaagtgctgggattacaggcgtgagccaccatgcccagcccatacactgcccttttaaagcctgtgttcgaaagtggcacacatcactgccgctcatattttactggccaaagcaagtcacgtggccatgccatttcagattgggaagtacatttttaccattgcccagaggaggagagagatatgcaatatttgagaatagccctaaagactacaatactatcccttagtccacctaaatgatcctgaggctttggggcaattaaaaaatccttactcttaaaaaatgtcaggcagtaagtcttgaagccagctgctggtgctacacaacatacccttgtcttgtgaggaatcccttttgaaaaggtaacttacctcgtcacttcattattgctcattgctacaggttgaattgtgtccccccaaaaagatatgaaatcctatcagtacctctttgaaaatagggtcttatttgaaaatagggtctttgcagaccctcttgcagatggagtcaagttaagatgaggccatgaatgtggaccctaatctgactggtagccttataaaaaagggaaaatttaggctcagaaacagacatgcacactgggagaatgccatggaaagatgaaggcagagatcaggtgatgcttctacaaggcagggaactccaaagattgctagcaagcctccagaaagcaggggagaccatggaatctccctcagccttcagaaggaaccaccctgcccatatcttgatcttggacttccagcctccagaacttttaaaccatcaatttccattgtttaagctactcaagtttgtggtactttgttacagcagttttagcaaactaatatgctaatcaatatatatttttatcatcttctttggacctagcaaggagaaccacttgggaaattgaaacaaggaccctctcgggaaagtttggtgaaatcctggccaacatgatgtctaatgctgattgcagtgaaattgagtactgttgttgatttttttttcctcaaagtagcttttggaagtgaagagtaaaatgtgttagtgggaactcagtattagcaagaagagaaataagggactatgctagcaaaatgaataatctgtctttattatactgtcacaggtggttatcaagatacagtttttgtgagacaaaaagctttgtggggctggagttgcttttgatggtggtggcagagggagagttatacgaatagaagtaacttctggtagtgtcttcgttgcatgtgggtacacccagtcttatgggcaagctgattttatataatcttgttcttttcagtaaattttgtatatcaaatatttaatcttacttctttgaaaaactttttagataagtgatgtttgcaaattgaagcatattgaaccatatatctggatattttgtttgattataaacccatttttacaccatggccatagagaatggtgccgtgggcactatcaggagtgatgtcattaaccccacagggctatgtggaaagcgtgtggctgggactgctgtgtggttgggacaaggcagtggtgcacatgggccagctcctgtaactttcctgtttgtggctctcatggggcactcctgctcctgctctccccgtcctcatccatgatacatactctctctcatctacgtgctcataaatttcagcagcaagaactgcatgatttttaaaattctgagtagatgcttccagcaaaggatttcctaactgatcactgccagagaagaagaggtgctaaatagttgccaagttacatgctttttttcccaaatgaagtacttcccctgctactgcttgtaaagccctgattgtgtgtgtgcgcagaacccacatctggtgctggaagcctaaggactagtgagtggtcatgtggtttatggcccctataaaaggacccattctaaaagtctccaagaagctaactccacaatgagatgatgtgtgtgtgggtgtgtgtgtgtgtgtgtttgagatagggtcttgctctgtcacccaggctggagtgcagtggtgtgatctcggctcactgcaacctccacctcccaggttcaagcaattttcctgccttagcctccccagtagcttggattacaggcatgtgctaccatacagaattcagattcctctcctacccctagcctgatgccctttcattagctatacaaaggtggttgagtttcaggttaggcttattatcgtttaaactataaactaaatattcaccaaagctagcccagcctaagcccaggaataatcaaggcagcttgaaacctaaaagcaagaggaggctgggttagatcagctcactgtataatttttgcaaaggcggttttattgaaacctgttcttttttgaaagctggctctttctaacattcaaatgcttttgatcaacctattttatggaagcagaatattgaaattaaagtaaatattagatgaactttatagccagttgttttcctcattcttcaactctttaccctacaaatcttatttaaacaacatgttcagcaagctgttatcttgcttacgcaatgaatagaacattatgttctaaggtacagtttgctcacctatgaaaagaatttaacctcttttctaagtagctatacacaattgtcataccttaagttcttatttagatgcatttcagaatattagagcattttgcaagtagatgcacgttcttacccagtgtcagtgtttatagacagacactcaccatgggtatatttaagtctagggtggtaaagaatataaatgtcatttattaaaacctgaacatagccaactatgaattatttgtgttaatgtaaacgtcgaatgagcactgcaaacatttgatgtttgaatatttgcctgtagaagtgcagtactatgttctatagaatataagtagatgccaccccagtcctcaaggtttcagtgaggtcatcattgtatcaataaaggtgccaatttaagatgctaactggacattggaaaaaatttgttgtcctattctgaaggatgagtcttatataaagtgtttttaaaatactttattgaaactgccatgttcttttcaattttggtagctcccctgcatttaatttagtcataagcgtctgtattaatgggtgtgttcaatatgaaggcatcctgtgaagacaataaattatattatacttatctagtctgcactctttatcatgttgataaaatggcccttaccagtaaaaaaactgtttcagaatgtgtaagagtaagtctgtctcagctgactgagggcttcatcatgttcatgataatcccagcagcttgaaatgtcaaactggtagctgatccatagcacacagtagtgctaattgagataggttggtgtggataattgaatttaattgaatattaaacaccagtaagtgctatgctagatgttgggaccacagtgatgaagatgacattatcctgacccgggaggcgctccttatgtgcataaactgcatttggaaattttcatgatttgagagtcatctatggttgccagtagagattttcccagaaggccaaggatatatggggacatttgactgttctttgaccataattatataactttttatttgcccagaatgaacaactgcagggtaacatttatacaaaaggaatttagtgtgcttagagtgctgataatacttgagaaactaggagagctgttttaaagcacttctttttcttttttttttttttgtttttttctgggctgttagaatttgacattgttcaactttaactttgtcctcattgaactttatcctgctaaggagctaaaaggtccatatgatcaaaaaggcagctctcaacccagcacgaaattccaggctcattcatttctgtttacctactgccaaataagtcagacaactgcatacttgctttacagacgaatagaggacagcatgttgttcaataattgtagtttaaaaagtatatgtaagatacatccacaagaagaaagatagagggagcataccgtttgtcttctagtataggctccctgcccatggagatcacagagtagaattatgatgggtgccttagagaccagcctccctcaggatcatgagttcacctcggcaccacagctctgggcaacgtggaattagacaaattaaagtagttaagttctgacttcatagaacagaatctaaacttttgttcatactgcttttgtgttcttgggccatctgaaaaccttttctgtgtaaatattcctgcaatatgcggtcttacagaggtcttatcacgcatatttccctttgcttccttatgtatcgtattttttcaagaagaagacattcaactttagagacaatggaatcattgtgttgtggctttaattcaggtcattgtccttttgtgagttgcacgtgtgcgcgagcctgtgtgttttgcttggaggaatagtgaataagcaaggagcagagtccatttgctttttctaacagagggtggggcagattctctcacaaccattaaagaaaaaaataagataccagcaataatgataatcagtcatgcatatgtaatcgtgtgtagttcatacttcagattcatatacagctgagcatgatcttgaatgttacaggaagcaagcttgaaagtcaagttacagtagaactttgctaattcatgcctgactaatttgcccacccagtagttcctactgaaatcttgccattcctctaccaactttcagaaaaatttgatagcaggctgtggagaaggctcatgttacttcttatgtcaaggtgtaaacaaaaaagagagcacaaaatacatccatcagaccacatgaagtgaagagagagaaaacatctgctgaaagccggattctctgtttttttcctgctttttaaatgtaatctgtctttgtttatgcatgccctagaaacatgcataagtaaccctgagtagtctcttagtttaagaaaacctactataaaatttcttgttgtaaaataaaattctaaaaggaataagttgtggacatataagtatcagacagtttatgtaagactttacataggatgcaaggtaggctgtaatatgatttggtaattgttttatgggggaattttgttttgtatagcgaaaaagaacagtgagtgatttaactgaattttatagtttaatattgttgttgttttaactaaaatctttggtttgctattgcaaaatgaaagagaaaggaaattttggttaatgttaactttatttccaaaaccatgtgatggatgctgaccaaatgtgtctcaatagtgccattgaggtctgttgcctttttttttctttgaggtgctaagtgaaatgtgttttgaaccttgaatgttcactatgcgacgttctttgcattacaggtagatactgcaaacttgcttcaaaaaaactaaaaagttcaaataactaatggttcatatttgttccagttagtaaatatcacgacaaggtatcatcgtcatcccatgttctcagtatagattcagcttcatttcttacaccacacacccagaggcataaatggaagtacacagacaaaaggaaaggcctgagtttaaatgtagttatcatgttcagtgttcgacattttattctgagaatttaagtgtttctactgcagtaccacaaagtcaatctgcatattactttaactagatcacttgtaaaaataaatgaataaatgaccagtgatggttcagtgacaagagtgccagatgagtcatgaatgttttcacaagtaaatttgatagtaaactgctaagtttactgtatacgctgtgtacaaattagctcagattcaagatttttgctctaacaactgaacgctcagttgcatctttaaactttttgttgcgtgagaggggctgaggggcaggtgggaggaagtcagcctgcaggtgggaggtttctgtctcaggattgctgatacccctgcatgctgctgggttgcagccttggagtatatggcctatgagacatggcatgtctgatttgatggaaaaagcagcggagaaccagtgaaccaagctattccgtgtattgactttttaatacgtttactacaagaatctgccttttaaagtacttttaaataaggttataaacataagtgtgttttggacacagcctgcagcaagcatgcctctcgaggtgtaagatgagtcagctacacatgctcaggggcccgttccaccagccacagtagctgcagagggtgagagcaactgaagcaagagaagctcttagtaattaggggaaggaagcctccacttgacaccgcatcaccaccaagtatttattgagtgtctttggtgtgcaaggcaggagaatatcttctatggattctacatatttcagggttaccagagttataaaatcccttgaaatctatatgcacaaattgtaaatacgtatgcagctttttataagtgttcaaattctgccttaattgtgctcaaggatcagggtctcaccccagcattgtataccattgatagtcatgatttccttagtgaaattaagtaaattgactttcagagactttatttcatattcatcatgtccccatgtagccatgaaaaaatgatatgtttaatattcatctatttgtatgattaaaacaaaatatccgcaactactgacgattcaatgatcagatattttactgtaaattaatatcatcataaactcctagacattagacttcagacattcagagcccactcgatgcttggcacaaagcaggcaccaaatacatatttatagaatgaatgaacaaatgaaggaagaaacaaagaaatgactaatgcaccaaccatttatcaggaagtttaacagggaaattcaacaaccagatttgttttgctaatcttattaaagtgcaacatgtttgttgtaaaaatagatccacattcgtcattgaactggacagtctaaaatagatccaaacccattgtttgattatacttcacaaatgtaaggtaaaatagatgatactatctgtcatttgcttgatgctattggcaaatgtgaagcagttaccagcataaaagcttggaggttactccgaatgtatataaacaacagtggctaggctcacaagtgggagagagtctaaaaataggtaggcgatcccttatctcgttgcattgaaaattgtgtttatatgaagtgatattattagaaatgatgtgtgagaaaagaatttctgcaatgtctcctacaaattagagtgagaaaatgtatctttatgcagctttgaacaaaggattattattgctggactgtggaccaaaattttagtcaagttttttttttttaatgaaaagaaactgttcatttatgcagacatacaactttgtgtcctatagagacttgtcatctgctcttaaagttagcaccctatttttcctctggatgtccactgagaaacccactggtgtgatggtcattgaaaaagagagttgtgtcagaatgccctaaaatcttagtggcttaacacattcccaagtttatttctcattcacactacccgtcaacataggttggcaggcattcggatccacagggtcacacagagaaccaggccgaccgacccacatggtcacacagagagagaaccaggccgaccgacccacatggtcacacagagaaccaggccgaccggcccacatggtcacacagagaaccaggccgaccgacccacgtggtcacacagagaaccaggccgaccagcccacatggtcacacagagaaccaggccgaccaacccacatggtcacacagagaaccaggccgaccgacccacatggtcacacagaaaaccgggctgactgaagtttgcactggagcttttcacagcccccactcagaggtgagataggtcaccttttctcattagccaaaactggtaagatggccttccctgaccacaaggatgctggaaagtgtagtcatcttttctctgtgcctggagaggagagagaagtgaaaattggtaagcaatatttctattttaaaagtggttagagtgtagtgcaatgaatctagcaccattggttcagttttaaatggactgattccatttgtctaattctgtgtcagttggctgttttctgacccctgagaataatttagtctggctgattcccccattgtaccaattgcctggcatatgacaaatgcatttttgcctgtaagacaatctttgcctaggaaagacagccctaatttttatgtcttgtattttccagtaagctaatctggagtatcagtttttaagactgatacacaattagatgaaactaattaaggacaaaacatttgccacttttaactgttgataagtgaaactgagatttccccccaccccatggatacagtgaacatttgtcagcagctggtaatggctagtataaagatgtattcagttttcccttcccttcctctccctccagccttccagccacccccttcccaaacatttatgctcatttagagaaaagcaaccccagttctcttacctgggatatcaccagtataaaaagcacattcgtataaattatctggcctttaattacctgtaaccctgtaggaaaccccctgggaaaagtaccacaaaagaacgcagctctgggggtctgtgagaggcacccagttcacacccctaaaggacagagcgagcactcaaacgcacagctttgggtgccctctgaggcgtgcactggctggtagcagtgggtatcaaccatggaagttcacggaagattaaaccgcaagttcccacgcaaggccaagtggctgccaggacttggaggcactgaccctgagtggtccttccacctcagcgtatactgtcactgctgcctctgtggcttcccctttccctccaagtagagatagatgtctcgaggtgctccccaccccagccaggttgtcctctcctgggtggcattttcctttctactctctggggctttcaccaccccactgggcataactctccacaggctcccctgggaggggtgcccccacctcacccgccacctcacttctcagcccctcttcccatccaagggctccctgggctgcccccaccctagtcatgatctcgctcctctactctctcgtagtactttatttttaccttgctcctggctcacattacatgcttatcttgtatttatagatggttctatatatgtctccttttgcatccttttctcaaagctcctgtgaggccagggatggttttatgccttttctcatccccttatgttctagtataatgctttacacatgattaaattctcatcagatgttgaatgaatgagcttattatgcattacttcttagtacaaagaaatatttggaacgtaagctctgaaatgttgatattctgtggatgcttggattacatacaatgtcctaaataaacacttgcctgttaagtagaagtcagtctggaaagtgatacctttagatccataaaatgtttataaggcacatgaatggacaaccacgttgttttttgctcttttatatgtttaggttactgacagcccaaaatacattagcttgtctttgggctaggaggtacctaaagttgtatttttctctcatgtcattttcctgggtttttatcatatccaacttcgtaatgtccaggaatttgagattaattcctcaaacttgtcgaataatacaagaggaaacttgtataatacagagcaaacttggttggtgagtagctgctagagcaaacttggttggtgagtagctgctacagcccatacatggatttgtttcttcaggtggggggataattgtatccatggactcttcttcattaactgacggatcaaattattttatgaagctatgatgagaaatggcttgtgctcttgggaaaatcaatgccaatgtaggtaatgcaccagtctagctggtttttaatttaaagaacaaattatcttctggaatagtaataaatccccctttggaacagcaagaagacatcagctgttggatatgggataattaccatatgtttcaatgtcgtaaaaaggcacagcaattttaataacccaggttgtgtacaagaaagctcttgcttctgaagaatccatcaaccatgcgctatgatcatgtaataataaactgctgtttacttaatgctgtttttatttaaagttttaattaacataacctagtctttgcaaaacatctgattacctttgactcatatgttttctggtatataataatgggttctcatgagttgtttattttataagatctcctgtttactcagagtaaggaaaattttttttgaggtaaggtcttgctcaggctggaatgagtggtgcagtctcaactcactgcagcctctacctcctgggctcaagcaatcctcccacctcagcttcccaagtagctgggaccacaggcacatgccaccatgcctgactaattattgtattttttgtagagatggattctcactctgttgcccaggctgatctcgaactcctgggctcaagtgatccttccaccttggcttcccaaagttctgggattacagtcatgaaccaccatgtccaaccaggaaattttggtattaggaagtttcccacataccatttgtctttggtgccatgaacacctattttgtctaatttttataccaacctttcactttggcacatgggaaatctgataaggaatcgatatcacggaaatacacatcacactttctgcttgccgctttcttccaaaataaacccaaggattccccttttccaccaccaccttaatttagataaccaagataaatgagaaggttttcgcacttgatggtgggatttcttatcaaggctattgaatttggtttggcactgactaattttggtatccatgtgtttttagagtaagttgtagctagggtggtggggtgatggggagactctcactgaatggctctaaattcagtattttattctttaaccaagcagctgttcacacacatttcttaggaagtggctaaataaaaatatggcagccctggaatgaacagaaactgttgctctttcaaaaaccagcagctacaaatagtgatttttcttccacaaatacttgtttttctgtgacattctcattggttttattcagttaaactcccagaccatgttgatttttttttgccttttattttttgagctcataggtaaaaggagttgaagtgattttattttctgtttttgtcttttttttttaagtttttgtagagacaggggtcttgctatgttgcccaggctggtcttgaactcccgggcctcaggcaatcctcctgcctcagcctcccaaagtgtacccagtctcaagtttttttcacattatatatttgtgttctttctgtttttaactaatggtctccattatttaggctatattaaaataacaataaaaacagagcagatacaacagaattcatttggttggccattggagctgtttttcctttttctttttaaactgactttatttttttggagcagttttaggttcagagcataattgagaggaaggcacagaaatttcccatgtatttcccccacacaggcacagcctccctcatcatcagcatcccccaccagagtggtatgtttgttacagttgatgagccgacattgacacatcatcacctaaagtccatagtttacactagggttctctcttggtgttgtacatgctgtgggtttggacaaatgtataatgacatgtattcactattatggtgtcatacagaataatttcactgccctaaaaatcctctgtgcttcatctgttcatccctaccatgcccctaaaccctggcaaccactcatccttttactgatttttacagttctgcctcttctgggatatcatgaagctggtggaataatgcagtgtgtagccttttcatagtggcttcttttacttagtaatatgcatttaaggttcctccgtgcctcttcatggcctgatagctcatttctttttagtgctgggataatattccactgtctggaaatgccaccgcttagttagtcattcatctactgaaggacagctgggttttggcaattatgaataaagctgctatgagctttttaaaaaatagtttaaatgacatatcaatactttaatatttaaaatatctcagtgatcatatagcctcagaaagcacagttttctgagctgggtgtcatgttgagtggtgttagagtgccgtgctgcgtgctcaggtgctatgctgtgaggaaggatgataggagcagattctgtataagcagatgcacaaccacccacagctgcactttggcacccagggcagacaaataaaaagggggcaagatttttttaggggagattcctggcagatagagattttcttcagaatgtacagatttatttttggggggtggttaggggcgacagttgttttaagcagagttttgaaggagtttggtttggtgagtgaaacagtatttcatttttgattgcctttgtttttccagcaagaaagctactcctggtctgtgggcacacaccaaaaggctttgggcaagacagagggagcttgtgtgtgcccccagaccggagtcataccacagttgtcagatcactttgcggcagaccttccgacagtctcctcatctctcttgtggaatttgagtttgacccacaggtagcattttttattttggtggtaccctgatgtttataaggaacctcaggacactattagttaggaaggagattgtcccatgcaattcagccttgcaagagcttcctggttgatctagggacaaggtgtctatcactcagccctccaggtcttttcttcctaaagcaggctttggagcaaagcctgaccggtctttgcctatgactgagtttcccagggctgctgtaccaaactactaccagttcaacttaaaacagcagacatttatcctctcacagttttggaggccgcttcaaagtaggtgtcactgaactgaagtcaggatgtccgcagggctgcgctccctccagagcctctaggaacacatctgccccttgcttcctccagcttctgggggctgccagcgggctccagcctctgccgctggggctgccttgcctcctctgctgtgtcagatctccttctgcatctctcttacaaggacacttgtgggccgggcgcggtggctcacgcctgtaatcccaacactttgggaggctgaggcaggtggatcacctgaggtcaggagtttgagaccagcctggccaacatggtgaaaccctgtctctactaaaaatacaaaaattagccgggcgtggtggtacgcacctataattccagctattcgggaggctgaggcaggagaactgcttgaacctgggaggtggaggttgcggtgagctgagatcgtgccactgcactccagcctgggcaatagggcaagactctgtctcaaaaaaagaaaaaaagttaaacgagtgtcttggcactcccctgtaatcccagctacttgggaggctgaggcacgagaattgcttgaacccaggaggtggaggttgcagtgagccgagatcacgccactgcactccaccctatgcaatagagtgagagtctgtctcaaaataaataaataaataaaaataaacaaggacacttgtgactgcatttagggcccagaacaatcccccatctgaggacctttcatttaatcacatctgcaaaggcattttcatgtaaggtaacattgaaaagtttcaggggtcaggacctaataaattttgtgggccagtattcagcctactgtcccctagttacaacaaggatggggcagcttatggacgagagtgtcaaaaaattcagattctgtcctacagggatcatcttaccctgcagctgagttgagtgattattgagaacatactacgtgttgatgctgttgcttagcactgtgggagatacagagatacataaaactctgcttgccctgaggttgcttgtggttttgttggaagagaagacgtgtgtgtaaaattagtcataagaaaaaggtcgtgtttgatcctgagagccagatagtggtacccagcagtgagcatccaagcccttatctcccaaataggagactttgtaggctgaaaactggcccacagatttattaggtcctgacccctggaacttgtcaatgttgccttacatgaaaatgcccctgcagatgtgattaaatgaagggtcccggtatggggggttgtcctggatgagctgagtgggccctaaacgcagtcacaagtgtccttttaagcccctgctgtgcctgttctcttggtaaatatctctgtgtgctggaacatttgaccagagagagatttcggtgatcatatccatatttgactgtttcctattccataatttgtcgctgtctccgagtcttttcccgggagccccctattacaagtgcacctttctgtgtttattcttccctgttgtgcttcgatgatcccttttttctattcttcagtggctttttctccagtaaaatagcagtttaaattcttgaagggaaacaattaaaaaataatgtctctgggttaacaagtatgattaccgtcatctaaatcagtgatactacatgagaataaaatcaaggagacttacatttacagtagatgaatctatgataatatgccctaccgttttgggtaatttaaatttatgctagttcactctgtctacatgcatgtcatatcttagtgtaaattatagaaatatccctataaaagaaaaaataatttttttctgtatatgttttaagggaacctgaatttctttgggttgtaatgcatgatacagatagtattctgggaatacctgatgttcagcttatccctggaaccctggttatcttagtaaaatatgcagcaacaatatagaagacaatcctgaattttccactgcacaattagggcttgattcaccgtatgacttgggcaaattacttaactttttgaaaccacacttttctgattttcaaagtatgactaataatggtttctgccttaggattattaagatgattaaatgaaataatgcatgtgcaacgtttagaacattgctttaaagtttgtcttttccttctctctccccttttttcctttaaaataaacaaacatgtttgagggctgggtgagttgatgggctccctttagtgcagcacttctaagtaatcactgttccctctggttcattccattgagcacatgatgacaaacatttctggggatatcatgtcaccttggatatagaacagtctcctaaattacattttatatgacaatgtctcactgtatttttgtcctcttgaattgcagcatagcatattatttcttccagcaaaaagcaaaattaaataaataagtgattaagttgctggctgtagctgatactgattcatgacatgactgaggattacttagccatcacattgaattgatgacagttgccttctaaatattatctttagtcacatccctcgaatgtttgcagtgactttcactcctcaactagaatatgcacgtttacatacacatgcgataaggctgaagaaggcttgtggctcagcacaatttggtcttgtatgcacagtaatcattctgaagtgtatgattctgttttattagaaattctcacttgaatttcaagagaataaaggaggattcctcctacacaaagctgctaattgtttgcacactgtgtgcatcccgcatgataagcgatttgagaaggtgccacatcagtgcctttatccaagtgtcacctcctgtctacagttcccttagcagggtgaagggagaaagatgcaaagactgagcttggctgaaacaaatgtatttttgtccccttgacttcttgaattgcagcagagcatatgaataacattgatatatttcttggctgctagacaacaacgtatttctttgacagattgacgcctgaaaagaaaaatacagtatgtactaatgaatcaaaacattttttagtacctttgtgtatactaaatgtattttagtttctatctggagctagttgccatttactgtgggtttgaaatgccctaagttatcttctatggatgggtagaatcaatttacccacacattgacagcttttacagataggtcctgtaacagatataattaagttaaatttcataaatagataggcagtctcctccccagtcctggtccctttgggagatgaattggggtgggggtaatggagagtttcaaaaaggctttccggtgtctttttttaaaaataaggttttaagagtttcatggtcagctgttctcagtttttctcaagatggtatccaaagtaaggctcaaatttatgatttatcttccaaatgcttaaatggtccatttatgatctgccagatgttacaatgactagctccccaaggaacgatcaagaatgtgccaatgtctgggcaagatttttatccagcaaaaagaaaaaaaccataagaattggaggttttactttgaaaagtaaaatcagccacatccatgacttaagagactgtacatattgtcatgggtaaggatttagatcttggctccactgcttactcacagtgtaccctggacgagttactaggcctttctgtgttttactatgctcttttgtaacacagggagagatagcatctatcttctaaggttgttgtgaggattaagtgaactaacttgtgcaaagctcttagaatagtgctgggcacagagtggtgagtgccttgtatatgctaatagttgttgatttatagcttaaaattaattgtgtgatgcaaataggagggttaccaccccaagcttaaatggaagttttgcagcactttgcactcttgaggatgtatctgggtttaatagtaccttccatctagtgcacaagtcttctcccaggctcatcctcccaaacacctctcagtgttatccccactttgcaaatgcagtagtagctgggctcacagaagttaaataactacaccaagtcaccatccaaaaaggttcagggccaggaatagagcgaaagacagaatacggagccatgctctttttgctgtctttctcagtgctcagttctcagaattactcaggaatgagagcagagaaactctgtataggccatgcctggagttttttgcacatggcagtcagagagtcccagctcagttcagtgcagtattaccgaattccagtatatgctgggctctgttaggtgcaaggggttccaggatgaatgagtctgtggcccagtggacaaggtttgcccctgtgtgcagctctgtctgctttactagatttgctcctcagattctaaattggaagtatgtgcatattgcttgatttacagattattagagaatttttttcagttaaactttgtccaaaatagacactaagggcaaaggaaactggtattattacagcagggtgtatctcataagctctgagaattgtacatgtataaagaatctttgaatcgccgagtcttagccccacgttttatacagcacagaaatacagcacagaaagtttaggtgatttcccttgggttccatagtgtgttagtcaccaggttcctttaactctctcagtactctttcctttaaactatggaagagctcaaatgattaaatcaataaaagaatgacaacttatagagctcatttacgtgtctgaatatatcagtttagcccagagtatctgaactcctgggccattgctattcactgaccccttctcctcctcgtgttctagtaaaattcagcccatgaatatagtcattagaagttgaattttaatgaaattgggcgctttgatcaatgggaaggttgaaagttatgtgggaatcatctatatagtttatagctgtgactatgtaggccagctcctaagtgccccctgcaatgtgtcactctctctggttttctttccagggaggtaccctgtagaataacagtctaatttacctctcagacatctgctgtctttcagaccttatgctagttttgtgcatatcttcatgattcctctaataatgcattggattataaactattatctccacttgagagacgctcagagaggctagggagcttactcagggtcagagggagtgcagctgaacagttctgccagggtccctgtgattgttggagcagcctgtgttttttcaagctgttgtctgtgaatcgtacggtagaaacatggtgcgtatttctgcagccttagttctagccattgaaatatcatggagttgaatgcagaatacccattaatgtttaggatgaccaagaaactgtgcccaggccccaagcccagctctgtcatcagaggtgagttaccactggtgccatgccctttgattccctacaggcgccctatggaggtgcccaccagtgtgcacttggaagtgtgatggaacgcatcacatccccttgttgcccctgccccggtgatagggggattcactaagaacttcagcatagtgagagaatgtaactgaagctcctgggttagtgctgcttggtatcccagttactttgtagatttcggaatcttttgtcgtctagcctgaggattactgttgatgacacaattttctttgggattataggcttcatgtttcatacaaccagcatatacgtaaatggcctcttcagtgtatcatgtatacacattggtgaatagcttcccactagataatgttttaaaggggaaaaaaagaagtcatttctaaaatcccaagagagtgtccccgttttgaggttagagcacgttttttagccttatttagtcttgcatcttgctccttatgctacctttcattgctttatgaaattattttttaagggatactttctaacattccatcccactttttttaaagctcgttcatatactttgtcctcacagaatagaacagggtttctcaaattgcacacactgaactctgcaacacaacagttccttcattggagaccagatgaattgaaccactggctttctgaaaataactgtatgctttccagttggccagccttggcagggacccactactactcctatttctcaacagtcaatttaaaatattgacagtagcttaataacattcaatagtaacttgcagcagcctttcatataccctgacatctgagatatgtaccagtttatgaaatagaacacgcagatggtcttagccccattttccagatgaggacccttgtccagggaaggattggtgcccatttagctagctctttcccagcaagcaacagtacccaaggctccatgccccaggcctgggaggacccctcccacggcgtacttcagatctccacctgtgactttgaacacatgcttcgaggtgatgtacttcttggagatagtgctttcctcatctcttctaccttgtagtcgtcagtagagggcatgcagtgcaacagaagtggatttcaggactgagactagggtgaggcaagagaggcatcagaatgcaaaagtgaagtagacacctgccgtcagcactgggcagccctgctcctggggccttacttgactcatcctggtgggttttccaaatggcagaggtgcacaaccacttcttgcaagcatgggcacttgaattgtagcccatgtacacagtgattcttggaaaaagtcatgagtaatgaatggaacttttctctcccaggttgatcttgtgttttgagacataaagagtcaaaggttggtgcctaggatgctcattcttattgtttttggtagtttgattgttgaaggcttttgacacgacattgaagtgaatatttggggcattttgctcctctgggcttttctctaaagcaccctcacatttcctctctcatgttcctgggctttcctggctttgatgctagccccactgtgtgttcccattaatagccctatgtagcctggctccttattctggaaactgtgtaacttttgctcttgatcttaaacacaactcagtcttgcaaggagctccgcctttggtctcagcttcttggggatttccctggcagccacatagtgaactatgtcacactctctgttttacccgttaataaggaaatactctggtacatggagctttgcttgctgatctttttctaagtactctgggggcaaaaggaaaagcagctagaggataaggatgtaactttcttcaaattaagccatcctgacccgtggtagagattagccactaagaaatagtggaaacaaataactgtttcactcttgagtgttagcatggaagagattctggttgaaatcctagtcctgccactttctggttacagaaacttacattacttttcttttgatgtttcaaggagataggagttaaagaaaaatgaacaccagattactagaacattcttatagagttgcccaaagatggaatggacaccttccagagtggaggggagggagtaggattggacagtagtcctcaactgggagcacttcttccccctgaccccacacctgcctcccagggacgtttgacagttttggattgcacaaaactgaggggtgagagttgctgctatatctagtgagcagaagccagagatgcttccaaataccttacgaagcataggacagccctcacggaaagaattatctagctccaaatgttaatgatgctgactttgagataccctagtcagaagtaacatttattggccaggggcagtggctcatacctgtaatctcagcactttgggaagccgaggtgggaggatcacttaagcccaggactttgagaccacctggacaagaccctgtctctacaaaaaaaaaaaaaaaaaattagcctgatgtggtagtacatgcctgtagtcttagctactcaggaggctgaagtgggaggattgcttggacccaggagtttgaggctacagtgagctatgtttgtgacactgcacttcagcctgggcaacataacaagactctgtctcaattaaaaaagaaagaaagaacatttgttgaatctaattttcccatgtaatatcaatgactgtgcaagataaagtggtttttatcctcactttggatgagattggcctttggtgattgagaaaccttcctttggttgttcagctacttctagatagacatgggattttaaactagccatctatatgtccaaaacccatccgctttccacaaacccattatgtagttagctccccatcactgatgatgttcaaagctaagcagggtgagcaaccacttgaaagaggggatggatgaggatacaagcctaagatgtatgttgcactaaatgacttttgaggtccctcctaaagatcacattctctggttctattttgaaatgggatttgtctttttagccccagtgttagagtggcagccagatatcccttggctatgaccagtgaaatccctgtgctttgtgcacctgtgaatcttactcctattaatatcccagccctatcaggccagagggctagggttccaaacaggggcagccagaaatgcaccatcttctgcatcccatctgcattccgggcccaggcagttatttttacctccatatgtaaatgggcccagcgatttctcatttaggagaacagcagaggcacaagtgaggagagctggagaaggaggggaacctatcatatactctgagattgcaatttagtatcagtttgctgatcagtgtcactccactagtttaataagtaattatagtttctcttttgtgaacaaggaaaacgggtagcttcacccagtggttgtcagccctggccaaaaattagaataagatagagggcttttaaatcacacctacaactgagcccctccaccagaaatttaattttctgaggtgaggcctgggtacagtgatttgagaactttgcagggattccagtgtctaagcagcctgggcacctctggttaatggcacacctcagtgctgcgcattctgctccagtacctgctggtgttactctgtcataaagagactagaaaaagagtgagttgggccctgtttctcagtgtgtcttcagtggattgtagggagaaggaggcccatactctctgcctaaacgagcacctgctagactccgaaatctagttaatggaagtttctcctcatccttggacatccttgttttatatggtatacgttcaaaatacatataatctttggtttaatttgttttacaaagttttgaagttttcctctccacacttttctcatcaagctggtgtgtggaaagaaggaatttttcttttccattgctgtcatctaaaattgttgtgtcgggtggggaggggagggagccgggagacttagctttaactacttagaagttttcagggaaatgtttttataacaacctagttaatagtttgactttatgatagattctgttccttcattattttgtcctccagtggcttttatacccagcaaagtggaccatggtgtatgattcaagaagggtgaggagtatgtctttctttggaaaggcagggatggagggttgtgatttagaaagggtaagcaggaaaggagagccacagaaggcaagcactgttctcatgccagatcggtttcaaggaagaggacatatggaaggatctagaaaatgatttctctagaattgtccatgtccaagtcccctggaatgtctttgtatatccccagagctgtgcatgctccagtttgaagagctctgctttaaaagatatcaggggtgggggagatgaggggggtgaagtaaaagaataaaaactattcaattccatttgttttctctttcaagctcatacgttactcatttcatttttatattaaaatatagatgaggaaggaagggcacatggcaagatttggcaagcataatccatgaggggatatggagttggggatggcagcatagcatactaggatttttgaggagggattcggggagcctgttcatgttttccttacaactctggtacatgaagtacaggttctgcatcatgatggaagactgcctgggttcatgtttgggccactacctactagctctatgactttgggcaagtttctttcttcttttttttttttgaaatggaattttgctcttgtcacccaggctggagtgcaatggtgcaatctcagctcactgtaacctctgccttttgggttcaagcaattctcctgcctcagcctcccaagtagctgagattacaggcaaccgccaccacgcccggctaatttttgtatttttagtactttagtacagaccgggtttcaccatgttggccaggctgttctcgaactcctgacctcaggtgattcacccacctcagcttcccaaagtgctgggattacaggcgtgagccaccatgcccaggcaagtttcttaacctccttatagcagtgtttggcacatgatagatgagctacaggttggcttgttattccttgcaatcctgagtttctccccagagtaaagctggagcttttcccccagccaactttggtggagtccactgggcagagatgtgatttcagccaaaatatggctaaaggaggaaaggatctgagacagccaggtggaaatggctccccgggagagcctctgaccgacccgcacactgggaggagtgcgcactggggtggagccttgggaagttggagccatttgcagcagggaggagcctggcccctcgtcttcttggatggtacctaggattcagtctgcgaggcaggaagcacactagcaggactccagcttggtggagagttcctgctttcctttttttcctttttgtccaataaatcccatttttctcaccctttaaattgtgagcctaatttttcgtagtcatgtgacaaggacccctcttaagctgaactaaggaaaagtcctgcagcagatctaactagaatgccaatgcctacattgaggctgtttaatggagagtttatgaaaagttagctagtgtccttgtgtaaacctgtatgactctagttcagagtcttcagtaattgcaattcaagaataaaaccacacggcacttccattcccgtgtaatttgttgttgctggcttgtgacattctacatatcccaactatgagacagccaggcagtgggatggactgtgaggttcagatgcccggagatatgtgaggaagagcttttagcaataaatatgaaaatgaaatcaaagtaaaaactggcattgaacccctggtgtacttaggcttacttttacccaaatccaaatcatttcttgacactgcatggttaccaagagtgtctgtcattcaatatttcagattaagatctgttctttggtagctaagttcagagaaaaaaatataggatctagaagtatcattgctattttttccttgatacatttagtctggtattaaaattgcttgcagaagatttgattttaaaaaagtagaaaagagacacttatcctggtaaaattatcctgaaatcttaagaaattaagacaaattgcaccataaaaccagaagcacaaaattaaacaatattatattaagagaacccagtgacacattttccttctaaattaactttaaaattaacttttaaattaagttcaatctcatatcagtttgctttgtaagaaatagaatatatgtacatgtttgccttatttttagcatgttatattcattaaaatgttttagtttattcagcagatacatttagcatttctttcacaagaaagacagtgaaggaacaattaataacaggaccccagtaatacctggggggtttctacatctgcattttttgcaaaaatagaatagccttctaagaagctgtcagtggcatttgtgcagctggacagctttgcagcagatgtaacagtaactgtgatgccaggctgtgccccagaacctgtaagcatgacaagctctggcttcttccctcctctgaaaaggtacaacattgaagaggcagtcgtttcccctagatctgtaaccaagcacatctgggtgaaaggggaagacatctcttcacagagaggagaataaaggcggtgaccatcagggtgacaggcagcatggactgttgccacctgtgctgcaggcagcttcagtgcctggatggtgggacagctggtcctgcactcagcacgagtctcaggcagtggtctggccgcgcctcccttgggctgcttcttcctccaccgtcctccacttttgctttgtgtctgcgtcaagtcagtaacgttggtctgcagctcccatccctcctgatgggcactgcactgaggccttagtgggcattacctgatgccctcatcacccagtgtacaaacacctgctgacaagaagcgtccctgagcggaacccttctgctgggacaccgcaccttccgtgtcctgagtgggctgcaccctcgtggtgctcaactgggtgacttcacgctgtcctcagcgctgtcctcggcgctctctctccagtcagctctcctgctcaggcacctttttgggacacagtccttgccagttattccctgtttaatgtcctcatgtgtcttcacttgccctgggagactgtcgtcttgagagagcaagccatatgggaccctgaggcctggcctcagtttccctcccccccactgccccacggggccacgcctcatcagtggcatggaccttttagtcagcgagccctcagccggatgctcccgtgctggccactcctgtcatccctgctctgtcctccctgcaaactcctccctcaggaccctgcttgaagttacgtcctgcacagtcatccctggccttccctcagcagaatctgtcactccctcaaggtgtccctgcagtattctgctcatgcccctgctacgtggcagaactctgttgtcctatcctgtccagagctccaaagcccccagaccctgtggctgctgagcacttgaaccatggacagtccaggtgaggatgtgcggggagagatgcctcctgcctgtggctgagccctgcctgaaggagctgatgaggaaaagctcctaagcacaacagtgctgctcacctgggcatctagttggcagagtcctatcccagtgttcgcacccccagtttcctgggtcttaagttcagattatcaagtgctcctcctgcaaaaaaaaaaaaaatggtgattcttgtggcccttagttgaccccgcacctgggatatgcttatatttggtgtggggcagagaactgagtgttcttgaaccacttccacccaaccagagggaggtggggacatcaggtacacctcatcccctgatgtcacagccaagtacctggagccaccaggactccctctgagcccacaaaggagtgtcttctcaccaccccgattatactggtctagttatgctttggagttaaagccaggctgctattgcagggctgctgcaatccttgcaagcacagttgttctttgcttgcgcttgctctcgctctcgctctcactctcactcttgctcgctctctttctctctctctgacttcagtttaactttttaaacttcagtaataagtgttcctcaaaatagatggtcttcctggttgtaggtacagccagcagggttgagttctgctgccttccagcatggttttcctggggcctgtaaaagtcctgcaaatttgctctgacactctgttgacatggaggtcctgtttgttgttataaataaggaccagtgtctctaggacacaccttactgtgtataactgaatggcagattttgtcccttacttcttaaaaattaaatggcagaggagctggccatgtaaaagccctgtgtgtgtttaccaaaaagtacttgaattttgtttgggttttgtgttctggtgcatatgaagtgaattttggtaggagtatgtgcattcagagaatatgtcatcacacttttttctttatttgagtgccacttggctcttatttgattaaggtaatttcagtgacatattttgaagcaattcaccttgaaaggcagaggcaccacccaggtgcagaaaccttccttgggttatgcaacgcccagcgtgggtggaaccgcactcacactttacctcttcctgaaccacagccctgctctgattgcatgatggaagctgaggtgcctgacaagtggaaggaggaaaaggaacattctgccttccttttctctgtaatgccaaagctggcgtcatgcattactgagggcctctgtcagcactggggccggccagtggcacagctgatggggtagctgcactcgctagtcctctgggaaagcccaggttgtttttctggcttagtgttagaggcagctgtgatgtttacctcgatctgtaacatacaaagatctgatcatatgctgtctttgcttacattctattattgtctgacttatgttctaaattctctacaattcccttccatttgtcttaagaaactctaaacctttttttttttggaaatcactacttaatgattttgaggatggaaccccagacagttggtaatagtggatggttttccttttctgtagttgagtggctttctaattcttttgatggcacacaaaaagaaattaaccttagatcacaacttagtacacacatttatgtatgcatgtaactgagatgagttcctcaaaatagcacatacctgtgttttatgtgaggcactgatattttctgttctatattatgcttaactttaaaaaatacttcctgtgtaccatttgtgggactgtaactcacaacttaaaaaatattaccttgatacatagctccagaaatacacatgggtcattttaccaagaatcaccagtgcttttgctctgttaccccggctggagtttggtggcacgatcatagctccttgcaccctcaaccccctgggctcccagctgggggtctttaggaccccagcgtgacctgtgggtagcccttacttcctttaatacttttcttctgcacagtcaggtgctctccctttgagcttccgtgtgaagttcactgtgcacccagctctgctaccaccgcctctgtcttgaaaggaatagggtggggtggtcattggtgtatagtaagattcgaatcacatccttcaagtacagttctaccctaaagataagagtccctgtggtttttgttgttgttgttgttgttgttgtttgaatggatgtgttctttgagaaattgagtcttgagtattttgtgaggacatctaagcctggcgtccacgtcagtgctgacagatttgacctagtgtgcactcccatctggggaaatgcccataggctataatctctttcactggagcgattataatagcccccgggcttcaggtcccagtggcatccacccttggtggcagcatacccctctgcatgaacagggcgcccacttgtcccctccttcttacttagtagtgatttttaaatgggagggtggcagtcctgaatgtagttcatcagtatttaccgcacaagctctaaaggacacagtgttttatttgtgtatttatttaacttttccaatatcggaatatgaatttttgtttcacctgataggacacgtttcaggggctccattctacattgtcatttcacaggaaaaatatttgatggctcattagaagggaacatctattattttgttactgaaaggcacattttcaaccttgagaattggatggcaggtaatggcatggaaattgacagcattttaccacttaaaaataaccacaagaaataccaatgttcaccgaatgagttgaagttaatttggttttgtaggctattgtagttaacttgatgcttgatggaaataattttgtattggaaatcattaaaaattgatttgattaatgcttttataatgttggtatgaggtgttgcactgtggtggtgatgacctaagggtgctgtgatggcctcaaacgttgtccctccggggcccacaggcaggatcccacacactagcacacctcccagttcctcttaccatcaaacagaggtgttccttcaacatgcctgctcctccctgtggcataaaggcaccaggaggttctctgatcccctgttagatctcctctgcagggttgaagacattttttgtttgtttgtttgtttgtttttgagatggagtcttgccctgtctcccagactggagtgcaagtgacatgatctcaactcactgcaacctccgcctcccgggttcaagcgattctcctgcctcaacctcccaagtagctgggactacaggcatgagccaccaagcccagctaattttgtgtttttagtagagatgggatttcgccatattggccggggtgatctcgaactcctgacctcaagtgatctgcccgcctcagccttccaaagtgcttagattacaggcgtgagccaccgtacctggccatttttgtttttaatcggtgtagtgtccctaacctaaatatttcacatggcctgaactttctgtagttttagcagcaatgggatgctttgaaacctagatctctcaccaactacatcttccattgactggtgaaacactagtttaagccaattcattttgaccatgtgcatttttgtgcttgatccctattttatttcaaaaataatttccatctctattcatgtaaactaataagagccttccgtttcctttaatggcaaattgtctcatcttttactgttttaaaacatttttttaacatcatgagaaaacgtgataaaaggtataagtgtagtttcctggcttttgcagtacctcagggaattcggtaaactgtattccatttgaggaaaggaacggttggagtaggaggtagtgtaaagataacatagcaaataagcattttaccagaaccctctgaagtctcatcagactgtgccatcatcagaatccctcccttctcatctacaccgtttaaagccagcatccagtcagaagcccagagctggtaccgccttgctttcctgccagttgctgacatatggcacacagtgtcagttaagggcacaggctgatgggcagcttggccacatacctctctggcttcctatctgtaaaatgggcacaatcattgtacctgcctctgaaggttgttgcgagaactagacgcagccttggcacagagcccacagagagtgagcactgtgtaaagactggctgccagccattagtactgggtgcctgtcttttggtgtctgggcaaagctttaacctgttttatcagtttagaactcagatgtctccctggcaaaacaacacgggcatatagatattttgtgaagttttgttgaagtgcacttaggttaatgattcatgggcagcctttcaaagctatcaggctgtgaaacagctttgaataagattgtcttgtccttctgctgattgtcttttccttcccacattagcagccatagcaggaggaggagaggtggcaagtggccacactactctgctcacattaagcagacaatttatggtcaatattcagtgaatttcttttttttatagtacagttaactgatatttatattagctttaaaattatagcaaaatcaggccaggcatggtgactcacacctgtaatcctagcactttgggaggtcgaggagggcagatcgttggaggtcagatgttcgagaccagcctggccaacgtggtgaaaccccatctctgctaaaaatacaaaaattagctgggcgtggtggtgtgtgcctgtagtcccaattactcagtaggctgaggcaggagaatcgctttaacccaggaggcggaggttgcagtgagctgagattgcaccactgtactccagcctgggcgacagagcaagagactctgtctcaaaaaaaaaaaaaaatagtgaaatcagccaaatagagaactaacaggcacactgcctaattccttgtgtaactgtcattggtgtgagtcactggggcagcgtgattaggtctgtgagctggatagcaaggctgtcattattctcaaggccttctgctgactgctgctcttggtaagacatacagaatctgtgggcacctcctcttaccgctctatgctagatgaggcgtctccacgttgagttgtagtagatacagctaagaaagtaaaagaaatgaaaatctcatcaaaaggattggggctagtctcattcttcatgcatacccaaaccgtggtaactttgatttttttattatccagaatggattgtttagaggagacagatggctttccagttcatcaaattttttcaattatctaaaaggaattcctacgcttggagcaagtcatttcaataaatctcattcatatttacctgctgcttccttttaaatggaagaagagaatgtttttcaagtacacttgaaaaatagcatatgtgaattagaaacttcctctgtaaactagcagagtagaaataagaggccaggattcagcaccaggtaggctggattccttcttaggtggctcaagctggctatggggctggtctcatcatatctaaagaactgcccagcttttacgcattttgaatgtggtggaaccagctgcatctttttatatgagagcggcaaatagtcattgtgttccagtttgcttctcgggtcatctaaacatcagaggccatgccacaagcaccgtaactgagggatatagtgtgactgtggtccaggccagtgacctctggagctgaatcatgacttcccagatgactcccagagcctgagaggggactggtgcgtggctccaaatgattttcacctgggcctctttgaagtcgggagagatacgtgcagtatggtagatgtggagagggagaggcatggtgtgtccaaaaattagcaggacctgatccatatacgtggactctgaagcagtgcacttactagattaaaaaaaaaacaatgtacttactggatttaaaaagtgtgtatttttttgtgagatgcagtttgtaagatgcattggtaactaggccatatactttttccattggctctcagctctcaagaagctctttagtttttagcattggatcagtaaacacttattaaaatgttcccagcatttgtttgccatcttctctttcagctgggcccagctgtgccctcaaaccctgcctgtctcttccctgactgatcatgttctcccagcttctacagaggcttccatagcattgtgcttggtagcagacaccagacagaatctcagccagctcagtccaggcgcacgggctcctggtctcccggggtgtggttactcgtgtctcctcggggccttccgccctccacattccagtgccaggccctggacctttgtctctattcatgataaaacatttttaggaaatgctgacgctcagtgaagaaatggaaacactaactctttgttctcttcctaacagacacgagacgacttcctgggccaggtggacgtgccccttagtcaccttccggtaaggacagtctcatgtttgatgcttcgtgctgggggcgggggtttctaattgtttgtagtcagtgtattttcagagtggcatttcttcaccacggtgaagaaggctgaaatgaagcacgtgtgctgtggccttagtcctttctggaaagtggtcctttcaaggggatggaggagaagctggctgtaagagtagtcaagggtgcctgagtcgtgcgcttgcgttcccatccaccagctccctctcttttctgcacttcagctgctccacctttgtgtatcacatcttacaaaacagacacctccttcactcaggcctcccttcttgtcacttactgtctctgcttcctaatgcatcctccgggtcccatcagatgtttgcactctttgtctggaaccgcacatgccatttctcttggattcctgtacacaaactataatagcatttcccagattttggtgtctggctttctcagtcagcatggtgacaaaagaagagcctgttcattctgagtgaacttgtcagctgggaacacccaccctcgctggaacacgcactgagttagcatgtgtggtgctgccatttctctctgctcaaagtagcggagcagtcgaggctgttgactagtgacgggcattagggctgacacccgaaacaggaggcagggcagacagaatgtgtaggtaggacctggaggccttgagaaaggtggatccccatctcctattccagcttcagttttccggcttgtcccagccttcctcctggccttcttccctgggcagcacaacgacgtgatagaagtagcagctgagagaggaaaggcgaatgtttctgccttacaagggcattgtgttatttttttaaatgctttgtgtgagcaaatagcataaatagtctataaagtaaagtgactttactttatttactttatttaaagctatttaaagctagcataagcttcctgctgtgtggaaattatggctgtttccatatgttaaataccaagtaagctttgaagatgtgttgtgaaggaaggtgatagcaagtaatttactcttactcactcaggggagctgttaaggaagaaagtcgcaaggttccaaaggactggaagtgaaagtgatattcttaaaatatcttgtttgtttctttttaaaactctgaagctccagggtgccacgggaggggcctgcccagggcttctgcgtgagaactactccatgagccatcagaaacctgactgctcttctcaggtcacgttgggaggatgtgactatttcaccttttgtgagcaaagacctcgcatccttctacgttgggaggtcttctgtgtatgttcttcagactgaagctgcgatcctctcacacttttagacagtgttggttgatgggccagctcttttatggacgtctccagccaccctttccctaatgtaaaaaccacatcttggccaggggaaattattttctgagaggcaaatattctaatatttggtaagaggcaaaagtgacatgtttaaaaaccttgctctgacaagctcttttttgagtgagtgagcagcacctggtcttgaaaggttgagtagggctcccagaaaatagaaaaaggttcctcctccgaggccaagtcagtataaagaatagtttagctttggattctgagtggaggcagggtcagtgagccttcaaagaaggaagcggtgcagaggcacagggcaggaatagaagccagccgattgcagagggtagagccgtgaacgcccagagaggaccgagtgcccctagttactcgtgtgcccagagggtaacttgcagtggcgtgcttcacctccatacttcaaactgactagctgttcacagccaactatagtcagagagatggaccacaaagaaaacaaaaggagaggcgtgaaggtatattctttattcatgtggcagtagaacccaagttgcgtgttctgaatgcacgtggcttttgaatccaggatttcaggtgctttcgtgtgtatgtttggtcgtgtgtataggatgctcatggggaaattacagtggcattctgtttgtgtgatagcacacaggtatgagtgtggagagggcgggagcatatgcgtgtattttgtggatcgaattatggatgctgtgttcttgattagtatatgaccattgtcaaggtggattattaacagtctgtagattcaaaatttgtcaaaaccaccaagctttagataaaaggaaatagaccaggcacagtggctcatgcctgtaaccccagcacttttggaggccgaggcaggaggatcgcttgagtccaggagttaaagaccagccttggcaacatggcaagaccctgtctctatagagaaacttaaagattaacccagcatggtggcacatgcctgttgcctcaactgtttagaaggctgaggtgggaggatcgcttgagcatgggaggtcattactacgctgagccgtggttgtaccactgcgctccagccttggagacagagcaagctctccttttgcttttacattcagagaccaagagcaaacttagctgtaactgtaccatcattgacttttcaactgccgttttcacatttgtctgttaaattcagtgcatcgttgtctaaaaattcatatgatatttgataacttgaatctattaattatttagcgataaagagaactctgagatctgtattaacagagtgagatttctggcaggtgtctgcctgttgcaccttcctcttgacttgtcagctctgtctccccttcccctggagccctcagtaacccacctttgcccagccacaaaatctcttcgtccctgggaaaggcagtggggcagagagagctattttaaaacattaagttttcctaaatcccagtcatgtgccacttaagacaaccatggctgactctggaatttaaattttcctagatgaggcattttcagggtggtggtattatttgatgccctgcctgtacttggaggtagctcagctgaccaacatccttttaccccttttgtgtttatggctgatggctggtagcaggtagcaggctgatggttccctctcatgagtgcagaattcaaaatcatggagtttggagggacttcagagacactgattcactcccagtattttccaggtgaaaaagcctgggcccagagagggaggggacttgcccagcaataagcaggtcattggtggtgctggatctgaccctggctctccagcatcattgtgagcctgtgatgtggtcaagggtgtgggcatggggtggattcgcccaaggcttaggtgcttgcagtggttgcatacaagtttcgagtctagggacccagcagggccctctccttccatttgcctgcagaatcctttatctcactctattccatagtgaatgcacctaggctgaaagcaactactctctttcaagatgaaagtactgagtatccagattttcttctgaatgcttttaccctggaacgggggcagcattgtggctattgtggctaatagcactgtttgcagcagtgtgtttaagatggctttccaccaggagcaccctcaaagccatcctgggaggctccactcagctctgctccagggaacaggatcagattggaacctggatgaatgccaagaagaatcttgtagttatctataagatcatcttctaattcaggctagagaatttcaatgaacgtgaactttgattttaatgccctacctgttactgcttggcattgagttggcagtactgacaaatgatatgaacgtgtagaattggccaatgaacatggctagtgtttgttgagtgtgccaggtgcccttgagaactttatagaaaccaactcagttgattggtttgatcctcacaacagccctgtaagttatggttactgccccattttatagatgaggacactgaggccaagagagataaggaacttgcccttagccacttggctctgtaagtaacaaagccaggatgcaaacctaggagatctgccttttgacctgtgtgatatcagtcatttaagctgcatagggtatggacagactcaggttcagagtccctctaagctccgtggttttccctcttcactctcttgcatgttctctgctgctcctagattgctcatgcccactggtgatcctgtaggctttgtcatactgtttgatttcctatgtttaaactgtcctttctccctgttctctacctctcaaagccttcccatcaccctgtattgtattgaactccacatccaaaaccattttgatttccaagtcagagtccgtctgttccctgtaccccaagtctcacagaatgtaacctctctgtgtcagtgaatttgttctgccttagcttctagtggattgttgacatgatggctcttcccttgtaattgtaaccataaggactgctataccatgttgtatccacatgtcgttgacataatattgctctcaaattatttgttggttggcagggcatggtggcttatacctgtaatcccagcactttgggaggccaaggcaggaggacgtcttgagctcaggagtttgagaccagcctgggcaacataggaagacccccatgtctataaaaaataaaaatattagccaggcatagtggcacacacctgtggtcccagctacttgggaggctgaggtgggaggatcacttgagcccaggaagttgaggctgcagtgagctatgattgtgcccctatactccagcctggacagcagaagaccctgtctctaaattaaataaataaatgttggtttaataaatgaaaaaaggaaggaaaaccagcaatagttttcttaataaattatccatttatttccttatatatatttacaaaccttttggtagaaaatattttcaaaatgtatgtttattactgcctcataagaacagtctagaaaatataatttacttcattcaatgatagtgaattttgagagcctccatagtttactacagatcagatgaattgagtgcttacgtgagtacctacttggtgccaggcaatgttcttggcaccggtgatccaatggtgagcaaattcaagtctctgttctcatgggcttacattctggaagtgatggataataaactagtatgtcaacaaatgaacaggtactttcagaaagtgatatgaggaagatacagcaggacgataggatggggggtgataagggtggctgatggtgggaactctaaaggatgagacctgggatctcacacttggatggcaaagtggaaacagccatgccatccagagtcagctgtccagcagagggacctgcctgtgcatgggccctactgcagtacatataatctgcatccatggcagatgaggacaggatggttgggagtacaaggaaggaagagagagactggttcccaatgaggttaaagttgattcaaggccagattatagttggtcttctaagtcataggaaagaattttcagtttattatgagaggagtaggaacccattgagagtttaaagcagagaatgacataaacagataacatttcaaatagcagtgcatacgtacatacatgtgtgtgcatgcacgcgcacacaaacctgatacagtaaatcactggactggtttatctcttgctataaaagtatttgaaattgtgtttaattgaagggtctaggtatttgaggttttactgaatatatagtatttaaagattaatgaaatagtcacacttatttatccaatttcctgctttggtaggaacttcacaatgaacttcacacaatcaaatgaacactgatttctttaaaaatgaacaaatactccacttgtactcatagcttcatgaactgaacctcagcagaaggttgatcggtgctgcttcctggggtgatctctgtgcaggagatagtctttcaattctcttaggctgatgttgtgagattttaatacaaaaaacaaagtttccctcaaagattaaatcttgtatattcttctgtttactccacccatatgtgtctcgagtcacaggcatatagcaaggcactggtgaccgctggttctccgaagtgaatcagctctgtgagactgaggccacaccctgcagttagaaattttacttggcaatgacagctgtaattttgtcatttgtctgtggctggggctggctcctaaaacccggtgtggatagtgacatctagtggatctctagtagatcagttccgtggactgtcaggtaccaagtgaagaaacacattcagcggtgccacattctaaaattcaaaatatattctctgtaatccagttgcctgtatctaaaacatgaaattattaggaatattaaaatttaatttactgttttttccccacagacagaagatccaaccatggagcgaccctatacatttaaggactttctcctcagaccaagaaggtgaggcttgtgggtatgggtgggtggggatgcctgccctgcatgctgtaggtataggtggggatgcctgccctgcgtgctgtggatatgggtgggtggggatgtctgccttgcttgctgtggtgtgggtgggtggggatgcctgccctgcatgctgtggggatgcctgccctgcgtgctgtgggtataggtggggatgcctgccttgcgtgctgtggatatgggtgggtggggatgcctgccttgcatgctgtgggtgtaggtggggatgcctgccttgcgtgctgtggatatgggtgggtggggaggcctgccttgcatgctgtgggtataggtggggatgcctgccttgcgtgctgtggatatgggtgggtggggatgcctgccctgcgtgccgtgggtgtgggtgggtggggatgcctgccctgcatgctgtgggtatgggtgggtggggatgcctgccctgcgtgccgtgggtgtgggtgggtggggatgcctgccctgcgtgctgtgggtataggtggggatgcctgccctgtgtgctgtgggtatgggtgggtggggatgcctgccctgtgtgctgtgggtatgggtgggtggggatgcctgccctgtgtgctgtgggtatgggtgggtggggatgcctgccctgcgtgctgtggtggttggcttttgctgaagacgattttaagtgtcctttgaagtcacaacccttctaaccaattttcttccattatgtgtgcagtcataagtctcgagttaagggatttttgcgattgaaaatggcctatatgccaaaaaatggaggtcaagatgaagaaaacagtgaccagagggatgacatggaggtacgtggagggcgtcaggcctctctccttgccttgagatcatattcatgttttgctttcaaactttataattgaaggaaataaaagtttagaaagcttaaatataaaaaaaagtacatatgtccgcaaattggtcattgatagtctaccagtgcagttatttgttttggttaaagatgaactttttatgttacaacaccaatcctcggagagatttctctttagacaatgccatgcctattccccaattttagccccacagctctgtgaaagtctcctcacacattgaatcctattattgctatggacttgcaactctttgtaaattctttttagccattgaggtcgcttcaaagtgggtggaggaatttagaaaatcacttttttttcaagtttcttactcatttggccacaggtgacagcctgcagtagaaaaaccctcctctagaaatgccattctgcaacgagctgaccagaggaatgtcccttttttccttcctgacagagccgcctgtatttaccttgtcacagactgatgctgtgggtcctatcgtaccttttcagcacacacctcggccagtgctgttttgttaggcaaattctcatattctcaaagtgtccattaaacgagacctctctagggcttattctcacatctgtttgcagctgttgcatatatgtgatatgtgaataatgtgtgtggagaagttacccgaacactcctccgcctgagagatcatatttccaggcattatttcatttacaagccttcatctctctatatacatgaagaggaataatgtgggtgatagaaatttatgaatgttaacatttcataagcatgtcaacagattttcatctcaaatccaaggaattttttacactcttcttgccttccaaccgcagtaaccagtgaattacttaattttccagtgattttagcagaggatgttaggaagggaatacgtaatgcctaaaatacgtgctgtaaaaatggaactcgaattttggtaccatgaaacccgttggtgtggacacagccagtgtagagggcctgagtagaaggcagcagcttccagactcctggctcctgcggttgtttgggatgcaaagaggaggcttctctctcaaagcccacctccctggggagcaacaggactctgggcctctggtcccctgtgccatgagttctgttagaacacaggtgcagcgcagctcatcttccctgctccctttacctcatagaggtgttgaaaagatggcagctgtactgtgacgcacatcattggcagggctttgtacagccttggaggccctccagtcaaaataacaaacatgacgtatggaaagagtatgatgtgacttaagtagtgtcaccgactgtgcagatccaaattgtgttgtcctgcaatgtagtcatcttagagggcagcacaattaattggccattactcagaagatttttgaggcctttctagaattgatatatatatatttttttggccttcatttgggaatttactcaaatgtggccccgaagccatggctagagccagagagccccagagcaaggagaagggcatgcagggcatgctgtgatgacctcttactcacagccgaagaaccaacctcataatcgtccctttaactttattccgcagcatggatgggaagttgttgactcaaatgactcggcttctcagcaccaagaggaacttcctcctcctcctctgcctcccgggtgggaagaaaaagtggacaatttaggccgaacttactatgtcaaccacaacaaccggaccactcagtggcacagaccaagcctgatgtgagtaccgtgtgatggtcaggaacacgtgcacgtgcactgcacagctagggacaaatatggcggccctttgggacaaggctgggaaataaatcatatgtctataagagcagatggtggtgtggtacgagattcctctccatttacgtaaagcatgcaagagcagtcagaacttgtatattgtaagcgattgcctttgagtcacatgctgctgttttcaatatgagctgatttattttctatgtcttcttttatgtcgattcctgaaatacaaagcagaggttgtttttcttagacttattttacatttgttgattatattgttttcttcttcacctttctctcccaactgacccagaacagaaccggcaagcaaattggctttgcaattttctgttttctctaagtttttggatgtttactctcttcaatgcattgatttggaaacctcaaaaatttttttttctttaaggaaatttgagccccttaatataatcagaaacacatgggagagttgcaaaatcagaattagtaattactgtgtattttaatccctcaccagcctcagggatgcagtaaaccaattcctgttttgttccctcagcaatttgtggtttgattgatagcaaataaacactggttaaaactcatggactttaaaaatggttttgtagcagcttgtttttaaatcattttatacagcaagatctaagtctattgataatacatcgaagggcaaaaagaaagtcttaaggaaaaggaattttatcctagaaattatgagctgcctagcagccaagacaaggaggaaattatcaatgaactatacaactttcagtatgtaataaaagcaagtctactgggtagtataattttcttgtctactcgaactctgaaagaaagtggctaatgatacattttagacaacaagcagtatgaggtatcatgttcttaaaaaccttttatctttagaaattgtaaagatactccacatatgactgtgggtggggagggtggccaagttttctggtctaggttttgtttaatttagagataaagcttgcagaatctggaacaacgaatagcctgtcttctctgagcccccaggtgggttctcgtgaatgtcagctgttcgtgatcagctttagactacccagcacgggcattagctcaggacagcaaaatggtctcaggacagcaaaaatatcagatcagctgggtaatgctgaactatcttttgttaaagttttttcccatggaaatagcttggttgattctttttgttttttatattattgcttactatttccttttgattaatgcccatagctattagaattattgtaatccattgtagctatttgtagtaaaaatgaatttggacccaccttgggcttggttacatgtagtgactagaagaatcttggtagcaatatcctaagcaaagcaccattacctacctttgctcaacagcatgagaaaggagtactgaaaaggtagatcctcatgcgacctctgcagaaaagtggccaggagcaactcacaaaggaaaaaatcctgatagctaatatgtatatggaaaaatattcaacttcataaataaggatcatgcagattagagtttgtattttggggacaaatagggataattgctactttctctgcctcacagagttgtgaaactaacgagggaattcttgagaaaacacttcatacattttaaaatatatactatttttttgatggctccacaggtgtagacatgtccccacactcatcaagaggtgtacgttaaacatgaacagctttttaatgtgttgattagacctcaataaagtgatttaaaagagaaaccatctttggtggcagtgtcccagaaactaaaacaaaaggtataacttgctggctcttcactagtctagagcaacaagggaaaaatgcagttctttttctgttgttgtttgagacagagtctcactctgtcacccacagtggcaccatctcggctcactgcaacctccgcctcccaggttcaagcgattctcctgccttggcctcctgagtagctgggattacaggcgcccgccgccatgcccagctaatgtttgtatttttgtgaagatggggtttcactggcttggtcaagctggtttcaaactcctgacctcaggtgatccgcccacctcagcctcccaaagtgctaggattacaggtatgacccaccacgcccggctgaaaaatgcagttcttaatccaagttcgggctcacatgtagttttgggagaaggcagaggcataactgccccatcaaggaggcagcaatgccaaagggagaggctgagccaggaaggacacagcagaacttggcagaacctgaggagcgcctccttccaatgggcataacttctagaaggcaagaggaaagttagttaaggaaaaagagtttccaccacaacctctgctagcaggccctttattgggatacagtataagttcatttcagaatgtgtgagaaaactttaaaatttgtgttttagaaagagtctataatgagtgttcttgataagtactatatttcagttagtctgaaatgacgatttcaacttttgagatactgacttgtgacataatttttgttaatgggatatgttatcttattgaaagtatctgtgagagttttccctgaaaaaatttttggcatttaaacttgtacactaaaagcctctgactagtatttcccccaaagtatgattgcctataatttactgcaaaaaaaaaagttttcttttttctttttttttttgttttgttttgttttgagatggagtctcactctgctgccctggctagagtacagtgacatgatctctcagctcactgcaacctctgcctcctgggctcaagtgattctcctgcctcagcctcctgagtagctgggactacaggcacgcatcaccacactcggctaatttttgtgtttttagtagaggcggggttttgccatgttggccaggtacgtcttgagctcctgacctcaagtgatccgcccgccttggcctcccaaagtgctgggattacaggcatgagccaccatgcccagcccaaaaaagtcttccaaattgaatcaaaacttttagatcctgaattgagaacatcacatgacaaaaaatagggtatgatgttttggtgttcttcagaccccggctgacttgagaggttatctcctgatgttattaggatttttaaagtagggtaaaggaggtaaatgcagtgtcacgattttgagattctgttaaaatgagctagaaagcagctgaaaaaaattcatgttggatcaggtgtactttcctccagatgacagctttgaatttgtcccttttgtagtctttggtcaaattgctggtgaccagaagtagctgccttgtcattgctggacttctagaaggattgggactgcccagctgctgtgtgaacttgcctgtcacctctgcttccagaggtctgacttgtcactgtggcaaatgggcagaggactttgatttctgttttttattaaacactgaggtatattttgaaatgtatgcctgaaagatgctcaaaatggtgtgactaatgcattttaaaactgcatttatttgattgaaatgaaccttaacctatactttagccgtaatatggtgggagaattctcacattggatgaccagctagttgtcagtgtttgacgctgacactttagtggccatctggccctccgtgagcattgaactgtcatgaagggcccgatctcaaccacttctcttcttctctttccccctttcctgcatgctcagggacgtgtcctcggagtcggacaataacatcagacagatcaaccaggaggcagcacaccggcgcttccgctcccgcaggcacatcagcgaagacttggagcccgagccctcggagggcggggatgtccccgaggtacgatgtccccagaatggtgcaaagcccggcagctccttcttcccatgttctccagcttgattttatatcataatttcttctgtcagtaaacattgttgagaatgtaaagattacagtgacgcagggaattaattaccatctgaatattaatttgaaagtgcctataaaagccgtatttgacaagtataggtggctctatattatagaaatgggaataacattatttttatttttattttttttgaagacagtgtcttgctctgtcgcccaggctagagtgcagtggtgcagtcttggctcactgcaacctccgcctcctgggttcgagcaattctcctgcctcagcctcctgagtagctgggattacaggcacgcatcaccacacccggccagtttttgtatttttagtagaaatggggtttcaccatgttggctaggatggtctcaatctcctgacctcgagatccgcctgctgcctcagcctcctaaagtgctggggttataggtgcatgccatcacaatggctaattttttttttttttttttttcctagtagagacgggtttcaccatgttggccaggctggtcttgaactcttgacctcatgatccacctgccttggcctcccaaagtgcttagattacaggcgtgagccactgtgtccagcccacattatttttcagtatgaaaatcttaagatatttttagtttgtaatttatttttcacaggggtctaaccatgtctcattaaatgacagcttgtttttatcatagttgagctgttgaatgagccctgtaacttgtttgggtatcatatgcatatttttattgagtcgctttgacacttggaagagatttattaccatgaaaatataaatttaggtgaacagaaatgtgtaattttccctttaaatagttatggtatgttacttaaaacgttatgaattaaacaacaaattagccataatcttccatgctatcttaccagctctgtttatgtactaaaaatccattcttcttagacattgtgttaggaagatcatttagaatgcggcgattcaacttggaaaagcaaaagtaatgattccataacacattcactctaagttattttataccattgtttaattacagcgtatagcttctatgctgctcccacggtgaatcctcagtggttaaaagtaaaagaaaatccatgacaattgtttataaactccagagaagtgtgtgtgtgtgtttgtttttttgcccacacatatagtaacaagtgctggaaatcagtcactgttcagagaggcattgttataaagtggttaagagcacagcctctgtctggaaccaggcctctttgattcacatcatggccctaccacttgctagatgttaccttgggcaggttattttctgtgcctcagtttcctcatctgttaattgggggagttatcttcctcgtgattattgtgaaggttgtgtgcctcatgagaggcacttagtaggtgttaattatagttatcaccggggctattgttgttacatggtttcattggggagctgggtggatccctacttctttctagtgtttaccccagtgtctccttctctgaaagccttgggagaccatttcagaggaagtgaatatcgctggagactctctcggtctggctctgcccccaccaccggcctccccaggatctcggaccagccctcaggagctgtcagaggaactaagcagaaggcttcagatcactccagactccaatggggaacagttcagctctttgattgtaagtagtggccttgtttgaaagaaaagctgagcaatgttttattgttttttgttgcttaaggagaatctcttacgtaaatagtgaccaagggtcttccagctcccagctaactctgacattttccaaagttcctccttccctaggagaagcaggactgtactaaaattagcccaagcaggtgagaatctttcttgatttggaaggcagctttgctcacccttataccactaacactttcttggtttataaagaactcaaagaagtaaaactccatgatgtctgtaattattagctttaaccttgtagaattcctttcccagccaaaaggctcatgaaaatagtacctttatcacaaaggtagtatttcacagtaacaattaaaagccatcaggcctaatcagtcctcttaagtcatattctgcaggatttatcattctcatttcgctgataagggcacaatgcttaagtggctcatccaagacaaggtttgagtgggagatagaagacgtctcctaagtcccagagtatgaacccttgagaaatgttgtgaaattgtgacactgtcatcaaggtagcattttaacttgggctctcaaccatcagaaacatactttctagaagcttcagatgggcccaatgcctgagcccaatggaatcagtcacaaagacttccatgtttgacaatacaaaactgtgcagaaataacccatagaaaatccctgcttgtgcatagaattaagagcaaatgaagtctcagtgtttctcaagaaactgaacttaaaaatgtacaatagtaaatgatgatagtcactccactgaaaatggcatcctaaaaaaaaatagtcattactatgaccataacaaacataaatgatagcactgcatacaatgtaaaagcaagtaagtactcacaaaattgttactttttggttatggtgtttttattttaaaagacagtatacgcctctattacatgagttgcatttatcattcagttaatgtgatttcactttgaaattctgtgactttttcaaaaagagatgtgtcgccaagatgaaaatgtagtactaaatggacaggataaaagaaattgcatatatatgggatatttgaactgataaaactgttgttatagaaacaacataaacaatgaagccttgtatttaaaacctataaaagcaaggaggtaccacagaatccatggcagtaacacacctttagtaaaccaagtaaacactgtaatttttttcagcaataatcataagttagcaattctaattatttaaatgaggagctcctgaatttaattattctagatctgtgaaatatcattaagacccaaatacaatgttgtattatttcacatcgtgttcactgttaaatgagagtcaaatcggatatttgctcattgggattaccctgtattcaaggggaagaacatgagctttggctgggcacggtggctaatgcttataatcccagcactttgagaggctgaagcaggcggatcacctgaggtcaggagttcaagaccagcctggccaacatggtgaaaccccgtctctactaaaaatgcaaaacttagccgggtgtggtggggtgcacctgtagttccagttactcaggaggccaaggcccaaaaatttcttgaacccaggaggcagaggttgcagtgagccacgattgcgccactgcactccagcctgagcaacagagtgacacttttattaaagactgattctttcacagtaaccaatgtgggaagatgtgaattgtcccccatccctaccacagagtcttcttgtaccatttacttatcacaaaatattaaaaatgagtaaatactagaaactgatactatggatgaacttgccgataaggagactctggcttctgtgtgtgacctgctgctaatcttcattcatatcaattaggcttcatttaaccacatagactaatacaaacaagttagaggaatattaagacactacacagtagatctttttttttagcttgatctcactatttttaatcattcctgtctttactacttgaagtccacttagaagctaaaattggctgagcatggaggctcacacctgtaatcccagtactttgggaggccgaggtgggtgaatcatctgaggtcaggaggtcgagaccagcctgaccaatatggtgaaaccccatctctactaaaaatacaaaaaattagccaagtgtggtggggggggcttgtagtcccagctactcaggaggctgagacaggagaatcactggaacctgggaggcagaggttgcagtgaactgagatcatgccactgcactccagcctgagcaatagaacaagactctatatttaaaaaaaaaaaaaaaaagcagctaaaattataaataccagatctttcagaagtaggccaagatgatgtctgagctcctctgaatataggatgcaactgactctttttcaattgtagtaatcaataaatgttgggtagccacatatcactatttcttccgtctattcacatcacattaaaatttaccctgagggtgcatcttagagcaaactacaagactgctagcttctttctgtttgtaaagcagcattagagtgttgcagagtcctgttgagtctcctttctgaaagttttggtctcctcttacttttgccactaattctaaggaccaatcaaaattccagtctgcttaactgaaaattaaagtgaaagataactttttcaaggatgactgtccttgctctgaaaagatgtttcatttaattaccttctaatatcgaagagcggtgaatatggttgagtgatatgtttgttaaaccaatgaaagttgcttttaagaatatatttcttgatgcttcctgtcttttcctctccttccagcaaagagaaccctcctcaaggttgaggtcatgcagtgtcaccgacgcagttgcagaacagggccatctaccaccggtaacccatgctaatttccagtcatcagttgactttttgggctttcatttacaatcatctgggctgctgcaaaaagagtttttcctgtgtaaatttatttacaatataaatgagatgtttttaaatttcctggccaattgccctaggaaagtggatttccaatacagagaattgttactgccacccatctctaaaatgctggaacctccattgctttagtttttcacccaaatttataccaattttgatttgctcacttaaacctcttggtacattagttagtaattccttttaccttattgagttactatagttatgctccagtgatctgtactttgaaaacacattgagtccctttaaccaggaagaactcttctgggcgaccgtccacatgttcctttcccttcctaatgacctgaagtctgaactctacagagcctctgtaccttctctttaaaggcagctctgctcaccaggaattggctataattctttccaactctctcatcattttaatagctatcagcaaatgtagaggtgtaggggattttgtaacatctgatgtatgtaaaaagaaatattcaagttggaaggcagactagaactgccctgagagatgtttgatgtacacattaaaaataagaaattttacataaatttgtttcttcttttggaggtgaaaatatgtggttttaatgtgttcaatttgatattttaccttgacagtttttgtctgttgctacaaaaccttgatcatttttaagactaataatgtattacgtatgaatttgaagggggaaaagtgcatttaaggtttttgaaatcacagtgtcttccctctcatgtatgttttttcttgacttcaaaggatattttggcctaggttttaattttttatgtttgagaaaaaattaatgagtatactagtcaaggaagcagtcaaaataatagagtcatttgtgacttacactggagagacttaataataagcttgataagagcgtcttttctgggatggtttcagtacagggctcccaaaaacaaaataatcaactgagatggactggtaggatccttctcaacctcatgatctgtgattttccttgaacgaatggcactttctctccttttcaaaatcaatgtcaattttatttcccaaagaactcactttcctggaaactggtgattcctccctctttctttgtactttctgatgctgtaaactcactgatcaccagtggcctcttgagttttgagtgtggggagatttcagaatctgctaattatttgacaatggcaggcaaaaccagaccagctttccatttttctctaaggcagctcactcttttgaggttgtcattgtttacccaggtcaaggatgagccaccttggggggcataggggtcacgcttcctttgtgctactggtcatcagcgactgctggctttgtctggatagggtgggtttcagggattctgatctcacgtcacctgccttacagcgctgccacagcagtgggccctgattcagacagcagggggtcatcccctaagtgcatttcactgatgtaaattatcattcacagcccagtgccccagctgggagagcgcgttcatcaactgtcacgggtggtgaggaaccaacggtaatgatccactttatcagacatcaatagcaagaggccgtgaggcagttttaatatttcgtgtagtggtgaatatacgctgtttttaaaaataagattagctcctttgtgctacagagctgcacacgtttcttattttaagcttctcatttggggattgtttaaaggtactgggtaaaatagaatgatttttttagtcccacataattttattaggaatactatcaggctttggttaagtgcatttaacttgaccatttagaagatatttttgacttttagtgtttgtactcctgataagtttttccatttcattagaatgcttggttaaagtaatttggttggaagatcatcaaagaagccacaggaattgcatgagactgtgtgtgtgattcctggatgtgcccagggcccttctcttttctgtatctcccctaccacatttttcacagggggttagacttttcttgtccccagaatgcaccatgaccctttctctgccaccaggggctctcctcacacaatgaacaagtttccgtaattccaagggaacataattaggatatataagtgatctagaaaaatttatgtttctctaagccaaccattcttattcattattttaaagaatgtatggtattcctgtctgtgggtgacttagatttgtattttaattgcctgttttctacttgatccctaaagttaggctagcttatagtttatgcttcgcactgcaatagctgtttaaagaatttcctggccgggcacggtggctcacgcctgtaatcccagcaccttgggaggctgaggcaggtggatcatgaggtcaggagatcgagaccatcctggctaacacagtgaaaccccgtctctactaaaagtacaaaaaattagccgggcgtggtggtgagcacctgtagtcccagctactcgggaggctgaggcaggagaatggcgtgaacccgggaggcagaggttgtggtgagctgagatcgcaccactgctctccaccctgggcgacagagcgagactccatctcaaaaaaaaaaaaagaatttccttattgtttcacctgtgttgtattttgctataactgctcattacttgtggataactttacgtatacaattgctgattttctaaagatgttgatgacttcaatttaatgctcagcattgtacagaggaaaatcaaactggcaacagtcagccccagaacactcagctcaggttaagatattgagctacagtggtttacatgagtcatgtgttgagtgaggcagcctccagtagaattcaagaaattctacatgaactattacccaccgtgcacttgtaatttctgtgggagtagtggagctttgagggggacaagatcgttttgtgagataattttagttgaattcagtgctgatgaacatcatctgtatatcacctatttttgtattttgttggccttgcaacctgcgtgtagctttggagtgttgtggtagctgatgtagtaaatgaagtaggaatggaatcattgcagtaccaggctccatggcaagggtcacctggcaggacaaggtgacccctctgaatgagatcccgggtggcacgttagactgccattttcttgccttcttgcctgcactctcccctccccgtcactgagtttcagcatgggttgggtgttttctttccacaggcttggcaatattcattcctaagtgtttcatctactttggtagatgtagatagatctccctacctacttaggtttgaaaggatcacatccatttctcttctgctgtatcctgcatgtttctcttccacatcctttgtcgtgaatgcccttgacttcctgtcttgcaattctgtctcttcaccccgtgtttccctctttggcatcccctctgttcctctgcacatcactcacactgaagtgtattgtcctgggctggagccatcatggtattatatcatctcactgcccctgtgctctcacagacatacggctgtgtacacataggtacacattgtgccactttattttattttttttaaatgggatgtcatgtatacattacttagcaacttggtttttttttaacttatgttcattcttctgggacatgttaataattacataatattcactgacgtaaaggcactacagtgttaatttcccgacattcaaggactttctgctccccctaccctgccctttcaactccatacgctgtgctgaagtaaccgtcctgatatagctttctttctatgatagtgctttcattcctgtagtctaataaacaggccctgattctcagccaagaaaccacagccctttgatttatggcaaataaacgcacagtggtgtcactttctggcagactaagccagggccctccccatgagataaaaggagagggatagcacagtcctttcagtctttgttgtatatattctaaaaatacacgagccaccattactgggttggtgcaagtcttggcaaatctgtgatggtcagtgtcaaagtggttatttttaaaagcatattgaaacttctgcagtttacaatcgtgttctttattttaatgaaagaaacagagccactaggaagttctagctaatggcttttgggcatcacaaagcagtagtgtattcagtctatgatgaaaagctgtgaaatgttaaactaagtcgccatttctaactggtttgattacttttttgttaagctagggtggaacatgctcacaagcacagaacagcagaaggctggttttggcttcctggcgggcccttccatggcctgtctgtagaagctgagtcctgccccctcaactagccgtgcagggtgggaggcagtgtgagttacaaatggaatcatcagcacaagttgttctatgtggtcatttggagagaacactgtaaagaaacatttccaaattgccctctcacataaatgtaactaaattacaggttgccagttcagttctcaatagaagagagaatgagcattttaatcaaattcagcgttctgtactacactcctaattttccacaaactgattagtgctattcactgtggctgtatgaaagtaacctgtatggccaggtgcagtggctcacactggtaatcccagcactttgggaggctgaagcgggtggatcaattgaagtcagcagttcgagaccagcctgaccaacgtggtgaaaccctgcctctactaaaaatacaaaaattagctgggcatggtggcgcttgcgtataatcccagctactcaggaggctaaggcaggagaatcacttgaacatgggaggcggaggttgcagtgagccaagattgtgccactgtactccagcctgggcgacagagcaatactctgtctcaaaaaggaaaaaacaaagtaacctggttgctagaattcatacagctttaggattcagttctgacatgatctatgacacatccatgtgctttcagttgatcagttgcctcccaagtgtcctttccagagattgagtaactgcaaaaatatccttaaggtttccagagctaaggtttccggagctgagttttccaggggcggggccagggggagtggggagttatgggagggaaggggcctgggagagggggaagtggatcaccagaacggctgaaggggagggctctgggcggagggagctgagaatgtaacacattccatttagtatttcattgattgtataaacaatagtaggtcaaaacttgatagcacatactttgccagagatactaattgaccaggaacttaggttacaacttagctcagcaggggagtccattgaagtgcccggatccacgtagctctttgtgttggcatcgctgctagaggaggaggggaggaaggagcttcactcaggctgcatgctaattcatcgatgtttaatattcatgaaaggattaagtcagtgttgatgtttcttctgctcctgctgagtctccacacctggatccagaatgctccatgatccgagtctttgtgtctttataaactatctttagggagctttaggactttatctcgggaaatattaaggaaatggttttccttaatatcagcagaaagttttcttacacataatctaaaatcagctgcttcatgatcttacccaggtgatctttctctgaattgtgcttttaagcctgggaggttaacatactgcttctctgtggatggggttttcaaattacccggcagcatccttgttggtgctttctctaatttgagatcctggagtccaccagggaactccaggtgaccaccttcaccaagacacattgctggtagtgcagggaaaaggtggcataagcacaggaagaagttaggttcagaggaaatttgtatcctcagcctaatagcaagaaaacgacaactgctaaaatatctggaagtaaaagaagcagcttccttttgtaacctcacgtgagaggttattcctaaggcatgggctcctcctatacctttagattcccctaggagccgtggtatagctgtggtcggcttctggtttctgagcttttccccacttagagctctttcacaggcacagatattacatgcatcgcctatgcattcaagccctcctgggacagccctgatctccagcatctgtcccagtgcctccatacatcatcaacacatccttgtttttcagtgtttctccatccacactgcatttcttagactgcttctcagggatcttcttgtgatcaaatgtggactgtctaaatacagtcactctatgcggggcaggtctctaaacccaaaaactgccaagctgtgttcaccttcaaagaaacacactcctatcagcagacttgggtgcacatagcctggggtgtgaggctgggtgctgggagacttcctgagctggggcacacagatgtcctgggtggtcctccagattatatgctactgtgtgaccatcagtatcctagagaaggggctctgtgttgggattttaaaattttgccccagaagctacagtgttagggtcctaagctgatggaggaatgtaggcctaagctagaagagcaccccatgggagctacatcgaggagaaactcagagcatccctctcatacacagtgacactggacagtttgaaatacctttaagctctacctggtttggcagtggaatttagtagctagaacagatgataatgtttttccctttccctgtgatcaccttggcagcaaccctttacgtttgagactacggggtcttagaaccaagttctgtaagaatttggactctgcaactgtatggggttcatttcacagtagatttgaagctgttggaaatctattgctgttttccagacacttgtaagtgttttctatataaatagatctaattaactttgtctagagaaaataattatctgggtgtaccttactttattaaactgatcagaaaacaaatgcaaggtattaaataataatgatttcttgcacaaacagccatcagtggcctatgtacataccacgccgggtctgccttcaggctgggaagaaagaaaagatgctaaggggcgcacatactatgtcaatcataacaatcgaaccacaacttggactcgacctatcatgcaggtacgaagattgccatccaacttaaaaccgcaggccatagaagccgaaatgtacatgaccgaactcctttcctggtgtttatgtattgttctgaaagacccgtatttgtaaaagctttctcacaaagaaaatgcattactttaaatacaataatagcctaaggaagaatttgcttttcaaatcagtttatcactgaatatattttaaaaatgtgacgtgaaagatattttcaaagtaagagcctattgcagtgtgtagcttcttccctgcccagcccccactttaatccgaggctagtttttatgctgggctagtgattcatttttatttcccttgaatgtgtttccccatcctttcccccatcattatgtttaattatttcctccacgctttaaataggccagacctcttattattgctgtttgcgttgttgtttgggttcgcgctcctaatcacacacaccgggagatcctcctatgaagctaacttgtttttgcctccaaaatagcttgcagaagatggtgcgtccggatcagccacaaacagtaacaaccatctaatcgagcctcagatccgccggcctcgtagcctcagctcgccaacagtaactttatctgccccgctggaggtgagacggctacctcatctaactggactcactctgtcctgtgactcccattctttcttctctcttaactctgccttcagtttcgcagccacctcctctctctgatcagtcgttgtgttggtagtgaagggtgttcttgtgcagcctttctacctgcttctctgtctcgcccagttaacattcctggactctctcacctgattctcattctcatttggctaaggccgtggtgacttgtgctggacgtgggcactctcttttcaggacttccaccgttcttgttgtgtttcgcttctttttgcctgttacctcattagaattgcgtaatccctctttcaaataccaagtgctgatattgagtttttaaacatagctattgctttgatcatttgtttttctttcgactgtagggtctttcattctatgggcatacatgtttctgatgcatatttgcatctctgcatcatggctgggcatctgcttgtgctctctgtcgtgtttgtgttgttttggtgccatcctttaacatcacaaatgtcagagttagagaagccaaagagcaaatgtttgaggtcctaagcttgactgtgtcttagagacagctgtgggcttctccacgccctgggtccagatgctgataagtgggaatggatgctgtctcttccacactctgatatgaatgtcatgggtaacaactgtgagattccagatcgttgtatttattgatgtagcttttttcctttttgtgctctaaaacttgccaatctgttcttcattagactgtgagctcattaagagcaagggcacatttttctccactctgtaaaatctccatccataatgcttagtacagaacagtatttttggtacatactgagtagctaccaaaggatggtggttataagtacttaatattgttgtgtgtttatccaacagagaaaatgtaaagttagattgatttaaaagtaaatgaatgacagaaaacaggttttggggatcttccctcttgtccatctccaaagagaagccttctgcaatacccaggtacattttggcacattggaatcgcacatgctaaagagttctaatcctcattgttattctttagggtgccaaggactcacccgtacgtcgggctgtgaaagacaccctttccaacccacagtccccacagccatcaccttacaactcccccaaaccacaacacaaagtcacacagagcttcttgccacccggctgggaaatgaggatagcgccaaacggccggcccttcttcattgatcataacacaaagactacaacctgggtaaggctgctgcttttatttggctccattttcatcatgaagtctggcattaattccttgatttccttagtgtttgtagttcttgcagaggaattggattgactgtaaagggtgtctccagagggtctcctcagcctgcatctggcccctgcataaatgggcgggtgggagtgggtgggcacaggctggtagctgtctttggtattggtgctgggactgccttttctcctgggaagctctagtttagacagttcaccgtgctggatggaaaggtattgctctgtgctgttaagattttgttaattgatcccgtctcacaaagtaatctcactaggagttataatcattttcaaataattttttcttttgtcagtttcttcttgcactttcattggcattacccaccttcttttgatttgtcgctttagtttttaccgttcacatcagatcagtattcacacatctgaggtacattttcatgcccttgatcatggggtaggggatgtactgagtgactttggttgtagatctgatagctcctttttgtgatcattttgtcaaaattgatttttcttaccatgcaactctttcatgtactcctgaattgtacccaagaaagaatctgtacattgtattatcttgagcaaaatgagattaatcaaaggcaaatatgcatatctttgtatttctgtgtcagttctttatttctttagccgaatcggtggctttttcagtgtagtatatgattcttttaaaagtcagttggtattttcctgctatataatctctatacctgtaattacactgaaaccggttcccgtatttctggctatttttgatgctgcagatggtttttcttccggttatgtccccatcgaattgtctagctagagttaactcagagtttaacttggtcctactattatctgtgctacttgctcaaaactgatgttatgggaatgctggttgagttttggtgattgttattggccctagctcttcggtcttggaccaacaataaacatacaccattaattcccatttctagtgatggacattaagtgtgtccatttgatagaccagcagccttatattcaagaacaagccctgctcaaggggatttgggctgtcattttatgccttgcccattgtgtggtatcagttcagtccagcaggtctagagggcgtgctcctagaatcctttgaaccgtgggacattgtgtcttcaagggcattcttggcatttggggcagggacatttgtgccttcagttgcagactatttaacaaacttggcttctgctaccaggtgctaatggtcaccattacccccaccccaacatagtgatgaccagaaatgccctacacatttcaaaacagccctaagtgagaaccactctaagagctctttctattttgaagtaagggaatggcctgccaagagaatttctcatttagatctggtaacattcatttggtaaactgataactgcttctaaggcatataataacatgtaggtttgactcccctactagtctgaagataatgttacagatttgcaagcaagccaagagtaagagacgggcagctcgttggaaaatatagtaatggagttctttttttttatgtctttttacttattaccatggaacccctggctgtcctgccagtgttctcatttactatagcactgctgtaatttcaagtccttagccagaaacaggctccagaaataagggctaacgaatataaaagtagatggattagtgtaaggagccactgtggcttgccaacataagctatgattttagtaattttaactagcttggtaatcaaatcccctaaccttttcacagcctttcaagccacaacaacagtgtaattgcagctgggcagattgtattttaaattaaacagcactcgctttatttattgcttgcaacattgctgaatgaaacccatttttactttccagttgcgcctgtttacccagatacttgttattgactaatttactgatttaaaatcataatctgttagaacaacgttttgttgctgctgctagtgtgggaaatcctcaaggtaacaactggaaattccacaagctactccccttcttaagcgaattcagatgtgctgacacagctgcgctatcgcttctaaacaaaggcctaggcaggattttccctgcggaagacacactctaaattgcctgttcattttgacaaaagatgaagagccggagggaagcatgaagataatttgcaacttaaaaatctgttttgagttggttttagggtttgctttgttttttatttttgaaagaagaagagaacaaatgagagaacagcatagctattcttagatttgagcattagaatagaaaaaggaaaaaaactggtaggacaggttgaaaatgatgaaaataacactccttcccccatcggcctgggcactgttgattcttacaccaaccagaagcctgaaaagtatcaggacatttcccctctatacattgagaaattaaaaaatttattgaaatatgtcatgaaagatgaccttttacacacacacagatactgaaggcagtatgccatcagtatttggataaagtttggcctcattctcttttttttaattattattttttttgtttttgagacggagtctcactcttgcccaggctggagtgtaatggcacaatctcagctcagtgcaacctctgtctcccgggttcatgcgattctcttgcctcagcctcctgagtagctgggattacaggcacatgccaccacaccagctaatttttgttgttttttgttttttgttttttttagcacagacagggtttcaccatgttggctaggctggtctcgaactcctgacctcaagtgatcctgccgcttcggcctcccaaagtgctgggattatgggcatgagacaccctgccaggccaagtttagcttcattcaaagaaagaaagaaagattggctttgttccccgcctgggtcaggcctttcagggaatgcatgctggagaccaggggcttgggagggatgtaccaaggagggatgttccatcctcagcagctcagagcacgtgtatacgggttgagtatccctagtttaaagattcaaaatccaaaatgatccaaagtctgaaaccttgtaagcactgacatgacactcaagcaataaatgcttattggagcatttcagattctcagattagggatgctgaagtggtaagtataactgcaaatattttgaaattcaaagcccctctggtccccaagcattatgggtgagggatgttcaacgcatattagtatatttgtgcctttcacaggatgaagcatgggcttgcttttgtagcaagaaagattacaccctagttaagttgcaggtttgttttccatccaagttcaaactaatgaaacttattactctaggtgtggttgctggtctcttccaggatggaaaagataaagaaaaaaggcacttttttttaatccctgtgttttatatattttgaattaggaaagccctttttaaaaagatactgctctttgcatcctgtttaaaaacactttgaacttgatggagggaagcaattttatattacacatgaaagagttcccgttatgaaactgaagaaaggaagaaacaaccaggcacactttatgcgttggatcatttattttcattgcatcagagccctcgttagtattccactttctcatcagctctgaagttgtccataactaatagagagccttgaccgccacttcatgtgccctggcaactaaggagagatgcctgcctccttgagtggctcggtgggagtcagggcttgagggtgaccactagccttagccctcagagctgattcatggcagctgctgccattatttttattatttttgataaaataatattataagcctcaaggcctctggccctcacagtctatgaagtctaggtttccatgcaaggccactttagcagatctttgaaattcggttgactttatacttcatgctctgcccctcactgcctccctgacacttttctctaatttcagcttcttttcacgctacggccccccccgccccccccccccctttaaatcaccagccttttaccaatagggctgattgtctttcacggtagcctacatgtgattccaaggtcaggctggccttgtgtgtagcattcagaagccctgccctctttcatgtaatagcagtcctcagctttctctaaatctggcatggtcataggctaggtggaagcccaagggtcccccgctggttgtggcgttacctggtccggatcagagttagcattgagtgggtagcttttgagaaattcagtgctttcagtttttcctctgtctgtagttaaccagtcatgaatgtttaccagattatcagcttcttggaccttctcaatcctaaatcagcttagcatatttctttatgttctgtgtatgtcagtgtactgcagaatactggattattttgtgcctctgcttagccttttaaaaaaatatattgggttcagggtcaatatgcatcacaaactgctaacaggatttctttcttcatttaaaagttcacctagctagcaagaagcaagggttgatttttgttgttcgtggtcttttttgattcttgccagttcccaagatctatgattatgattcagtgatactatgacttacacggttgacttgggaagcagaaaaatctagtaatttggcagcagcaaaggccctattataaaattgaatgaagctgatatcaaatgtcttcacagtttactttttttaatcttaagcttatttggttgatagtggttttttttttgagtataaagatatggattctcctttttatgtttttggaggcaagactcactgcatcacccaggctggagtacaatggcacaatcacagtttacggctcactgcagccttgacctcctaggctcaggtgatcctcccacctcagcctttcaggtagctaaggcaggcatgcaccaccacactcagctaactttttgtgttttttgcagagatatggttttgctttgttgcccaggatggtctcgaactcctgggctcaagcagtcctcccgccttggcctcccaaagtgctgagattacaagtgtgagccactgcatctggccttacactgcatttctttttcttttttttctttttttttttttttttttttttgagacggagtctcactctgttgcccagcctggagttcagtggcacaatctcggctcactgcaacctctactttccgggttcaagcaattctcctaactcagcctcccgagtagctgggactacaggcacacaccacacccgggaaatttttgtatttttagtaggaacggagtttcaccatgttggccaggctggtctcaaactcctgacctcctcagcctcccaaagtgctgggattacaggcatgagccatcgtgcccggcctacactgcattttaactgggtctacataagtgagagtcagctcctggactctgggtcataatctttgggcaacttcctgttctctctgaaactccatttcctcatctaaagaaacagaccatgtgcccaacctcctaccaagggtctgttgcaggattttacatctgaccatgcctcataaatcatgcagcctgacccaggttgtcagagtacatatttctcttttgttgattctctgtggtatcttatgaagcttatgctttaagaaaaaaattttgtaaacgtttaaatattaagacataaatgagaacttaatctgcagaacttggtcaagaatctcagtaaagttgtatcataactttgtgagtttgcctgatgaaagcgactctccctggagtagccacgtgacttcacagaccagattgacattctctgctgagttcagaaggagtggaggggagcacaagtgctggaggagggtgtggcagggaggcctattccctaacgtgttaggctggctcccctcaccgggagctcgggacccatggagagatttcgaaaccgttgtccccactccctctttgtgccacattcactggcaccctccattctggtttccctagtaacatcactgctgggactctcttccccttccccttctcaaggtctcagggaaatggttaacctttcatgtaaatattcttactctcctctctccaccaagcacaagaaggaagagtacagtctgtctcgagagacagtcagccaggcttcctgtacaaaacagagatgggacccatctcacgctccaggcatggacagcctggttgccttgaaacaaacagctcaagaagaaaagcacccagtaactgcacacagatacttccacttagcatctactgtcttttacatttttcttgcaggaagatccacgtttgaaatttccagtacatatgcggtcaaagacatctttaaaccccaatgaccttggcccccttcctgtgagtacactggagacacatggaatggtctgaatatgtgtgttcctttatccgctcaatgttgatggagaggccctgtggaccttctctatctccaggctttgtggatctcattggtttgtgtttcttaacagaattgggtgtttagctgaattgtagtcatacattatagttcatgtgatatccagtacttatgaaagaggtttctgaattgctagcttctagcagaagatagaccttgtacacaggatgttcaagagacgttctctgcaggtgacaatttaagtggcactcattcattttgtaacttagcaaccactgagtttcagtcatattgctgattaagtcatcagaacaaaaataatgaaaatagtatgggagaagaaggcctaattaatcatagaaagtttctataagtcatttaacctgcagatttttaaagtttttttctcccttgttggtgacggctcagtaggagttgagctatatacttaaaattggattttgaatgaaaccttcacatacatcctcctcaacaactcactctcagtttgaaaaagccgtagggggtgacagggcagtggttggactccaaggctatttttaaatgggaatttttgttgttgttttccaagtgtaagaacctttttgttgcctggtatattagggcaacattggaggctgcgaaggttaaggttcaatcattattcattaggttatacaggtatcccacaccaaatctgtttggttcctgggttcaaatagaaagaaccagagagttagtttagaaaacaaaagaaagcatttttttctgaatctgttggattcctgaggttcagatagcaaatatggatagttcagataatgagggcataccagctttatcttgaaaaaattctccaaatctgtttagttcctgagcttgactagcaaaagttcatggtggataataccaatattagatcatcaactgcctggacaacacaaatacagttaaccatgtctaacatttttatattaaccccctcttcctttcctttagtactcagtatttatttaattaaatggtactcaacttcaaactccactgttccatggaatgctgcggtttccctttgaagcttttgagctagcagcccatttccggttcttcatacagtcagcgcatctgagacctgagcatgtgataaagcgtgttgctagacatggtcaagagttaacttgaaatgttcatatttagttcacgctcaatgcataaatgtaccctagcagaaaagagtacagaggtgttctatagtttttaaatgttgcctttgatttcagaactcctagctaatgtttatattttctctctcccttccttccccggatactagcctggctgggaagaaagaattcacttggatggccgaacgttttatattgatcatagtaagtaggcgctgttatggacacacaggtgttgtgggttagagggaaggagtaattcaaacatcatagtgaaagctttgtcattttactctttatctaggcagccaggtgttatgtggagaaaatgataccagagaatcagtgccttcatacggtactgtgcattcaccccaagtttgcttaaagtagcccatcaaactttcacccaatctgatcttgtgacctattaacgtgtttttttttgttgttgaatttttaaaccacattttgattgttgatcccttgacttttgcacatttaataaatacactctggtaatagaaaataagattagaaatgatgatttagtcaaaaatctgtgaacagtgcttgaagcagcatgtaagttttttagacactgccttcaagggtcctatggcaggatgcccgctctgaccttattttctattcacggcatgtttccttgcacccacaacactaatatatatgtattttctggaaattgtagtatatttgctatagacatttgctccagcacctatgaaaaaatgtgtggtttctcattccaactaaaagttcaactaataaaagtttgctttttagccagtgggattttttttttctcattctttttggaggtgccatgttcttcatggaatcatatttctatgtcccttaaattttctgaaaaagtatattaaaaagaagccttcaaatagatgtaaagtttcaaccatgagtgcaatttggtagtatcttggtctttgctttcatttggttcatgaacagaaagttagggtttccctggcttcacaatttcataactaaacaaaagcacgttgatgagccacctgctgagaagtctggccacaagtaatcctcacacgtataggactggtcactatctcataggcatagtacgtttttcagatgttactaggaggcagagacattgtgaacagaatttcactttcaggccctgggggttgagggcttattataaatggaattaagcaaaagtaccagcagtttacaattcaactgaaagtagaagtcctaggtgtatttagaagagtgagctaccctttgtttaaaccagatatttcaaggtgcagagacttagtttttgtcttttatcaaaaaatgggcagatttgtcaactgtccagaatttcatagtaagcataaagtatttttcctgctttcatgtatgtgtatgccctacttttttccttaatatactatttatttattgttttaagagaatttactaaaatgagagagaggccacacctctttttcccatgaaaaacaaaataatagtttccggcttggtgcagtggctcacacctgtaatcccagcactttgggaggccgaggtgggaggatcagttgaggtcaggagttcgagattagcctggccaacgtgatgaaaccccgtctctactaaaaatacaagtaaaaactagctgggtgtggtggcgtgcacctgcaatcccagctacccggatggctgaggcaggagaatctcttgaacctgggaggtggaggttgcggtgagacaagatcataccactgcactccagcctgggcaacagagggaggctgtctcaaaaaaaaagaaaaaagtttcctttatagtattttttatacatcacaatcacagttttaagacaggtgtgaataatactgatcattttactaaaacaggtctttactggtaacacatcctggtctgtgacgcatggagagcattgcacacaatattgtgacagttttctggctggagatgtgatgcttaggtccccctaaaaagaatgttgtgaatgtgtttcgtataccgcaaggagccaaaaacagaaaaacacaattacaaagggctgtcgtagcatgcgttaaaatagtgaaaatcactgactatttcacttgtggtgtcatagacctagtatgatacatagcagatgcttgatacttggtgacttgaaatcaggttcatggaggatcagtggtgaagctcttaggaagttgttgtgcttgatcagaaagtgaagtgaactcacttgaggagcagtaggtgcccccactccggctttccacccccaccggcctgaggctagcgcaactccggcttactggaaggtggaagaaggtaactacctgctagatgcctgggcttttccttactcctgatcagttctgcagttactccagcactctgcccaaacatttcctcatttcacttgactagagcagcacccccgaggctccattatactctgtacagagcttgatgcaactaagctgtgccaatatatttgtggccattgacttggagattaaaatttattttgcccttgcacaaccatattgaaagattctgttaaagagatatagcataaattaagtgaccaaaaaccatttaagaaaaggatttgtttacgagtgcctccttagctgttcatgctacgtttctaccatcgctccataattcatcaaggtttactcaatggaaagctgtagagcagtacacgtcagtgaaacagttcaagtcatttgcctttccacaaaattcagtctgtgaaaactgcagaatacctatcttttgaagaggctttatcaggctgacacatacattccaaatgggttgaattacctggaagataacatttaggaatgtcctttctgtcagaagaaagcctctttttctaaacaatcttatagcaaaactcagcatctgattttgctgtcataatgcctacaggacaggaaccaggttatgcccacgtatgccacaatgccgtgagtgccgtcatcttgtaaattgcttagagtcatcttgtcttccagcatacctggcacgtgggtccacctggaattacagatgagatgatgagatgcacttgtcttttcaataattaattatttctgctttgtaagtttttcctgagaagttagacattttcaagatgaacaatactcagccatcataaagatttaatttcaagagcaacgaatgatcgagactaacctctttagactcctcgattcctttgtttgctgtctatggaatggctcctggctcttgggcctcaggtgggaggttaaaggaaggtcttaaactgaatctctacatcttgtaggaatgatgtcattcttcttaaagaccagacaggcccagcagctgagtaattggccacaggtatcctatctacaacattagaagagaaaattgaattccagtgattttgtaaagtcctattttagtctttcctgtcaacagtcttactagacctgttcatcgtgactaaactgagtttctcatccttccacttccttcttgtccttttattggaaatatatctcaaagaggaaaagcaagtttaaaagccaaagttctttaaaaaaaaaaaaaaaggataactggctaccccatactttcatacattgaccatacttcactgaagaattctttatcataaccatgtagaaacttgtgttgttccaaaagcttaggctctttttaaagggactttgttttcaccatcagcttcattcagtcattaaaaaaataatgcactaagttcctgttacctgctgggactggtcttaagtggtagagaggggattgcaaagatgaataacacacagtccctgtccttggggaggttaggtccagtgggaagtagcaggggatatttcaggtgttagaggagtgaatcagttgttacacagaaacagaagaggcaaggactgcatctgcttgggaggtggttgggcacagggatggggccctgagagaatgggtcactttttagatggatgacaaacactgagtaggattgaggcagtcaaagccccaggaagagtgatcctaggatgcgtggaggtgtgtgaatatgtgcagatgctgccacgttccgagaaacgcagcattgctccaaacagctagtgtgccgcaggggcgcacaggccaagccaaagggtatctgcccggtgtggggactcgggctcaagccacaggcagtggggagctcccaggggatttcccagaggggagggatggggtcgaaatcgttatttagagagatccttttggcagagctgtagaagatgtcttgaactggggttggggggtgagacaattcccagtgacgcccagagaacagttcagggaaaaaaaatgagccctctagcaagaagcttatcaggaatagagagggttggtccgggaccaccagagtgagtgacacggccaggttcctgattgggacagtgagtggattgtgatactgcacattggaatgtaaggtcacgttaccaattttggtgttgggtgatcagaggtttggttttggtagagttaagctgaagtacttacgggaaacccagatgcagatgtccaggatggagcttgaagttcaggtctggtctgaggacttgcgaatcccaatgagtcaggagttattcatttattttctgctttgatgacaatatccattgatacggttataatccaagttggtgttttaaggcgcaatttttactcagctgtactccgtttcctttatttggttttcttttctcttgttttccatcacaatagcaacttttactttccaaagtcttctgtgaaaggtaagggacccaaaaatgccttttgcttccatcaagattctctcaaacagttgagatttttcatgtaaattttctgccagcatgaaaacaaaagattctagaatcatcacttgctttggtagcttttttttttttttttagcttttcctctgcttctattaaaataataataagactttttaaaattcctaatatggtcattaaaacagaattcactaattattcttatcagctcacttacagtgtatacagaaaataaacagaatcaatattcttcccctgcactcccccgccccggtccccaagacaggtgcagatcgggctggagcatagtggcacagtcatagctcactgcagccttcccctgggctcaagcgatcttcccacctcagcctcccaagtagctaggactacaggcgtacaccaccacacctggctaatttttttttttaaccttttgtagagatgggtcctcactatgtttcccaggttgggcccgaactcctggcttcaagtgatcctcctgcctcagccccccaaagtattgggattacaggcatgagccactgctcctggccaccctttacttttcaaataattttcttcttctttttttttttttttgttttttactaacctagatatccaaaaactctggagaacctactctccctagtgtgccccaccccccgtacctttcatgtgagtccattgcactctctctccctccactccaccctagtacacacacaggaatccgtaaggtctttttaattatgcacagttacaaacaccaagtgatctaaggcagctgttgtgtattatcacctacacaagtaatggtatagatagcattgaacagtcttgtgcacattaactcacttggaagaaagcaaaccaccttttgccagtgtgaccaaacagaaaccatgctctgtaatcttcctctgctgtatctaattctcttttttggactgcctaagctgctttgatttttgtgtgcatatgagtgacgcatgtaatagattattcatttgttcaatgcaggattcttaattgaaagcagtttttcaacaccataagtaaagagaaaagtatttgaaatgagaaaaaaaatcgtgtgtgtgtttgttagccttttgggaaactaagactttttaaatgctttttttcaactaaatgaaaatcaagatcaagttataaatccttaaaagaacaggggtttataattcccattttagcaagttatttgcccaaaacagtatgaatagatggtttatctttagttgtgcatttttgattgagtgtttttaactaaacagtatgtgaggggggttgccatatagactgtagttacctgctaactctgaaatactaatttgtctttagaacacagggtgggggactggacagcttttgaagaatccagaaatacttccttccaaaactttctttacatagaatagatttgaactaatgttctgattttttttttttttttttaacattttcagatagcaaaattactcagtgggaagacccaagactgcagaacccagctattactggtccggtcagtattttcaaattctgcctcttcagtataagattttggttacgtgtttacgtgtttcttgtgtattactgataacggtgatgtcaagggacaacggtgattgagtagttgactagaaacagagcactttgctgccatctccttactgaagtttccaggtgaggtacagctgcatgtgccttttcagatggatttcattataaaggaaaacagcttgataacgacagcagaattaaacatttttcttctcctttataaaagggtggactataagtatagtcaaaattccctcccttcctttttatatgaagcaaaaccaagccctatcttcataaagtgttatcatttctttaggccaggagtagtaaatgtatgccaaaagtttaaatcttttacaactttcaaaaatctgtagaagtttgggtgagattatagctaagttcaggagctggcagagttaagagtttggaactctgccgacccacagtgttctcatggtcccctcatatatgccgggtggaaaaagaatcaattctgatgcaggcgtgatgacctcttaaaacaccgtagcacactgtgttcataaggcagtgtgagaaccccactccctgaagcatcaggagacatttggtatctcacacttgttaacaagtctgtagaatgggaccacactcatcagcagagagcacaccaccagcttttgtcagtggctatacgagtgcagggaggtaatttggaattacaggagttgtactgcgatcagcagaagattgcaaatttgggattcttagaccagaggagcaaaaggaactgaagtttgttatatcacatgctgagctaagaggccagtaggtagatttaaaattccaatttcatggctttaatctgattccattcaaattatgttttgaattagtaagatacatccatttgaaaacttaaaagatactacattgcaaatgtgccccggtaactgactcctgttagttacttgttggatttgtttagtcatttgggtactatttcctaggcaaagtgcccagtagtacctgggtaaaaacagtcaacttttttctctatgcggcttaaacactgccttactctgatgcttccttttgatatatatatattcgcagtcacagttgtttattggaatattattttctcttctacatcattagaacaaggtaaattcaagaaactattctttttaagtgacagaagacttttgacataactttgaagccttttcaaaatatttttatcacttatcaattaccggccgtcactcaaacactgctagtccttattaaatcttactgaaaattgctcagcatcataaagccaagtagatttgcccccaagaaagagctctctgctttctgttaataaaagacccttgtttattccttcatttttattattattattcattatattgctttcaatagaggagaatctgtatttaggtagttatcaacttagtgtagacatttggcctttgttgtcattcagttctaaatatttggcaattttcatttgatttttcttcttgacttatacattatttaaaatatgctttttagtttctaagagtatgggagggttgtgcctattcatttttttttattgatttctaattttattgcattatggtcagataatattgtctagagaatatttattattggatgtttatttaaaacttcattggaagcttgatcactttttgtaaatgttctttttctttttaaaaagaatgtgtattgtgtctttggttgaatatagagttctttttgtgtccattaggtcaagcctgtggtgttcaaattatctacattctcattgctattttgctattggatctaatcaagatagttctgtcagtctctgtggtgactgttgccctgtcgatgttgtctgaggtgtatataactacattctctttctctgttcgtatttgctgtttagcatatcttttctctctcgcgatattttatcttctttcttgccttttgttcaattgatagagtactctctattttattttctctatgtgcttgcaggctgtactttctatttgtattcttatagctctcacattaaactgtgtaacccacatacttgacttagggttaaaatgaatcactgtctactctccttaacatcaggacctcagggaacttgaatgccattcttcccactcccatttgccacgtcattgttgggtggaattttaaaactaccttgctttaaactttcctaatagtcaaatagtcattaatatgttttatcttttttctccctactgtccatactgatttaattttaccaaatgtagacaaatttctttgcccaccattggtttgcccaccattggttcttccatccattttttttctggggtgagttttgatcttagtgaagcctagtccagtttatggttcttactgtgtggtctgctgaccagagtatcagtatcgcctgagagcttgttggaaatgcaagttttcaggtcctaccccagacctactgaatcagcacctctgggggtgggacaccagtctttgttttaactgctctcccagggattccagtgccccctcaggtttgagcacttctgcccagcagcactgccagtgacagtctgagagtggtaatatctcttagtctttgactcaaaaggtctcatttgacctctctgaagttcagctgatgatagaaatcttggttaaattattttccctcagtgctttggagattctcctgcatgtcttctggcctccataaatgatgataacaggtttgctgtcaatctcattgtcgtttctgtgtaggtaaatggctctgttctctagtgattttgaatttttatttgtgtcttagatgttttacaatttcgctatcatcatgtacctatgtgtggagttctcttcatttatcttgctttggactcaggcttcttcagtatggggattgtgtctttcctctgttctggaaaattctcagctattatttcttaacatactgcatttttccgattctctctaagtatctgtttctgtaactcctattggacatttacttctctttcacattgtctgctttatctcttaacttttgtgttttctgtctctcactgctgtattgtgagttattacttagctcttccagttaattctttaagctttttttgtaatctctttatcagttcattgtgtttattatttcagtgactaaatttaattgctcaaagttttatttggtcgtttaaaatttgcttttgtcttcatagttattttgtcctgttctctttatctctttatttatttttgatgctttcatctgcttattatttttaagatatttatttcttagcctctttgagattattctattatctctggtcctaggatcattaaatctcccactacgtctgtagactctccttaagagtgtagattattgcctagttcagtttataatttgtgtgtgtgtgtgtgtgtgtgtgtgtgtgtacatgcatgcaagagggagagagagagcatgagcaagctcatttttttttcctatgaggcttttgtaagtcctgacctgtatttactgttaacttcttagcttgggttcatgcacccccagtcagtataactgtggacctcatacccactttggcacaggcttggagtatggatttattacaggtctgtttctttttgtttttctcccatttatggtcctggacagaaggtaagcttccttgcaacttccctggtccggtgggtagagttttcttgtcccctttccagatgttaggttttaaacaatgactgttctttctccatcatgtagaccaaaggccaagttctgtgtccccatgggagattaaaacccaagcccctatgtctaggtccagtgcccactgatttctctaattgtgagtctttctgcttacctagtacctagagtttctcttcccaagttttaaaaatatcagttctaagtaggcctagcgtttctacatatttttagggagaggggaccctttctgtggcagctcagtgttcagcattcctgtaagttagcatgctctgtgtatagcagatatcactagtaatagcatttagtaagtgatgttcacacatgctgctgtcatgaacactatctcatgttgtgtaacactttcatttttccaagaactttataatcagccgacttgaaactcacagtcgtcccctcagaaaggcagggcaaatgttgttatttccaatttgtcagaagctcagaaagcttattctgttgctgacagtccttgcaagggtcagaatcaggaccggagccccagatgcgctggtgtcactgatgtccccgtgccgggcatgagcccttctgtgcaaggagctccaatgtctcccggccagtgatgatgtgaaaacatttagaaccgacctacacaataaggcagattttcattctgtacccaaaacaggaacacagatttaatgcagagcaaaagggctttaatcaacagatatgttcatttttcacgtagacctattttacaagctaacttgtaagccagaaaatgacattcgagattttcaagtgagaacaaatgatttggtccaataattaaaaaaaaaaaaatgtacgtgtaatctcttcagaagctgcactggaaggatgtttgtcctggtacgttgttggaaagttttcaggaagagaatgtaaaaacttgctcttcttattctatcatgagaactacctctggagagaaaagataatgaatgcaagaggaagacagtgatttttcagctttcacgcatcattccccagaaggagaaaggcttgaaatatctcaacatttccgcccacacctcctcagcccctgccaggagacagagcaggcaagggaacgggcatcataggctgggggccacatgttgaaatctgctccttggggaatttgtcatttaagacagtcgaacttgcatacacagtgatgactgtttaagctttttttccaacattttcaggagtagggggaactgtgatgtaacagtgatgtttggagaaccctcacgaatacaggaacaaacaaaaaatagttgctgggaatcacagactttcagaaatagaagagctgagtcacgtttgttcatccagtcaaattcttccacttaacagtgaagaaactccttagtagagaggatgtgatgcagagccagctgatgagagtctacccgagagtgcaggccttctaacgctggcaggagagagtggaaggaagtcacttttttagttcctatggggtcatttttttcctcatggcactaccacggtttattcattgatttcctattgcctgttgctctcaacagcttgtgagctccaggagggaactgggaaagctacctttggtttatgtactgttatttttctggcacctaaaatgccttgcacagagtaggtgctcaagaagtatcggttgaatggacgagaatgaacaccagaaagtgagaaataaactagagaggaaatcttagtttgtgacgggatgtactgttggtagagcagaaaacatgatctctttattggcttatgtcagaacattgtattctttttcttattttggtggttgtccaggtattaacaaatttataccttgcctagactcagaattgctatgtggtttcatcagactaaacactgcctaaaataaataggatgtgaggtcaaatctgttgttcagtggaaaatcaaagaagactggcttaaaaactaagaaaagaccataggcagtgtaaattgtctatagattgctcctaagctatataaagatgatgtattttttgctctggaattacagagcaaaacactgacgtgctcattttctggaagagtggttgtttgttttgtttcgggttttttatataaacatgtcttaaaactataaaagagggaagttcatgttcttcatttcttctgtttctggtcaagataagtatggtgaaagtgtaaggtttggagtctggagatactagactaaggatcagtatattttattaacttaggccgaaatgataacagcagaagtattctctgctgaaattcatactagtggctaaaaagcaatgagttgttttcgaggctgtcatagttaatgtctgtgtatatgcaaaacccaatcctttttgctcataaaaatatcgtaagctttttcagtagccaaaactcacggccctgactctaagatattgtaagctactttacaaggtagcaaataaagattatttaaatgactacattaacatgttactcctttgcctgaagagatatcacaacttttgaatgactatagttaactcaattcctgagccctcaactggggtactatcactctatttcatagataaagcatttgagatttaaagaaatccttgcccaagaccactaaatattaagggacaaaccttctgacttctaaattgaggattttttgagaatgccatctgcctgattttatattccttgataggagtgtcagttcacttccctttctgctcgttgtatttccccacaaaaattcgttaaaccgtaattagacttttcaaaatgccaacgtaggtcattctgggttgtatgttagaagtatttagccaataactcttacctaaaccacagcaaaaaagaaaaacagaaacaccctgactcatattctgacaaaagtcacttggaaagcatgtttagtttgtgtagcgtaccccaaatggtttctcaaatagcagtatagctgttttcaggggtgaaagctgcattcaaagctgattagccctcatcagttctaggactttcccctgtgctgtgtagacattatctaatttttccatggataatctgagaagtgagaatttacggtttatgactcatgaaattctcttgaatgttgcctcagtatacataaaatttcaggtgtattgtttgcattatctatatttataaatttatcttccaggctgtcccttactccagagaatttaagcagaaatatgactacttcaggaagaaattaaagaaacctgtgagtaatcatgccttccaaaaatgctttgtgttagtcatttgtaagttaccacagtcacttcagtgagaacaacttggttgttacttttatatgaatgctaaaaatattaccttccttttctctctgcactttgatcctcctggttctaaaatctgaattttctttttaacagaaatggtaagtgaaaattaactcagtgttacatatcaaatcacctgaagggtaatttcctatgtaatacataaaaagacaggaatgatttttatgggatataaaataattcagaaccctagtcacaaaatctgtggaagcctattcaattatgcgcagttatcatatttaattaacctggatcccggtaagaaaaatgttcaagtccttccttgtaaatgcaaaagcttagtttcaactacagtatttataatatagtgttatatttaattataataattggcagtattacgtccaaatgtaattttctacttataattatccctggcagtttaaaacctagaaactctaaaaatttttatgggcaacattttaaattataacattgcattttctaatgacacaccatccccaaattgttcaacattgcatcctctgttttactttccgattcctccttagcagttttctcttcaattttctccatcactatggttacacctctagggaggggagagaagcggctgcagctcagaccccctctggtggcctgggctccattgccatctctccctgcctcctcccctcagctggttcctcctgcccgggaacatctctggatggggcacaatgtctgctctcatttaggggttttggtctctgttccaaagtcctgattcaagagcttgcgggtaactgctattgaaatgattctttgccttcaaaactcaaatgatcactgaaaattccacagttttctttgtgagtcatgtcccctggtaatgatgatgactgtggtcatcacccagtctcactctatggctctcacatagcagtgtctgctacccggaaaccatctctgcacattcattcttacagccagaccaagcctggaccgcctctttgcaggaggcagttgccacaaccttggtcaagtgttttgttattttcatgtcagcgaaccatgctttgggctgctttccccacacttggcataatcaggatcccactccccatggcaacaaaatggacttgaggcagcgtggattatatctaccacctggcggccctgccacagttgagcatggataggcccaacctggccaggtggggattattacaggttttgactacctgggctaaagtctcttgagtgaagcaacagatacagtcgactgcctttcggttgccctatgctggagaagtgcccacagttgtttattaaagggggcaaggaggatgttctccttcgcagcagagttctaactttcctgagcatcgctagtggatgccgtgtgtcccatcgtgacacagcaaggctttctgtctgcaagggaaaacccctaaaggagagaatctcagttggaaccatttgtcactgcctgtttctttgaggactgccaacttttctaccatttgctgttgtttttattagaaaacaaagtgtgtatttactgtatgattatgtgttttcttttgtcttttgtgtaggctgatatccccaataggtttgaaatgaaacttcacagaaataacatatttgaagagtcctatcggagaattatgtccgtgaaaagaccagatgtcctaaaagctagactgtggattgagtttgaatcagagaaaggtcttgactatgggggtgtggccagagaatggttcttcttactgtccaaagagatgttcaacccctactacggcctctttgagtactctgccacgtaagtatatggccacacccagtgtgtgtcccccactgagacagttgtatgaatttaaacagaatgaaaggataagcagctcatgagttcgagatgcattaactctgctgagtttgttctctcctcaccccacagccccttgcaagtctagaacaggttctgactctacgtggtgaaatagtgtactctgcgaacatctaacattgattttttttcttgtctattgggttcatggagttgaaattgaaaacgtggataattatgataaggaacaggaggcgattttcatttgcagtgttcaagaggaggacttgtcagtgttagaattcaaaaacaaaggaggtgttttttgaacaagagtcgtttctgaggtctcctgtgtaaaggcaaattgtaaggactttgaggacctaggaccatgccctgctcctgtaaggaaagaaccaggtttccccttgcattaggatttcatcattgccaggcttggaaactgaggcagactaaattgctttctgagcaattaaacatcagctacttccaggccagccattcctccttcagactctgaatcctccaagggttgggcagtacccaagcccccagtagaatagtcattgaccttgctgaagggcatttgtcatcactccagccctgggctctaaggggacgtgggttcccccacatctcccacctggtaccagtctcctgggggctcatttggaaggccgcctcagtacattcttcctggttgctctagccaagaattgcccaattgatttgttgttactgagtcccatgagaaagcccactatgtacaatgtatccaactattgaaggtggagggcagggtggagagagacaagatctttacctcttctccacattttcaaagatacccccaccccggaggaatcagtctgtgatcccagtttgaaaactactgatccacatgattgtgaaccaagcaagatcatttggacaaatctaaaaatttgcaggtttgcatcattgagagagccatatcctgttcctaatcccctcgaggccttttcagagcagagtagtggtcagaagacagaccaagggttgggcccatagcaaacatcttatggccaagccaaaagcctctggaaggaattaaacttccttcatcacagagacgacctaaagtactcacatctttgggaatccctgcacagcccctttattatgtggcgtttctcatctccccaagatatttggctgaaccatatgaaatagacacttcgtaggtcaaaaacagtcaaacatcagcgtctcttatggtttaattgactttagagggcacatgcgtcagcctccatggtgggtcacggttgagcatgtggtaagtcaggtcctctagcccacacattttcccactaggtacagaatgctcgcagggacactgtaaaagttgagtgacaggtggcaaacaaatatgcaaaatcttgcatttgaaagtgtgattgggcttttcttctctttctcctcaaaagggacaactacacccttcagatcaaccctaattcaggcctctgtaatgaggatcatttgtcctacttcacttttattggaagagttgctggtctggccgtatttcatgggaagctcttagatggtaagtcttgaagtaataaaaataggtcagtgctgcttgcggtttgctagtaggtgtcttatctttcgcatcatgggtttttaagcaaaagcttcactggtttactcataaagtatttttatgttttgcccataatggatgtccttttctctggtagcttattttgggcactgaagacatagtgtctacacacagttaaaaacaaaagtttttttttaacttcagtgtaaaacacagaacattatgtatttatacatttgtatgttttctggaataactttagtgaaagcaagatttgataacagatggaaaaactaattgaaaagttaattaaaatgatctcatctatctaatatcctgtgattattgcgtttgtccccaaattattttttaatttgaagggactaaataatttcaaaataatgttactgcttagctaagacattaaccctgaaacaaataacacaaaataatttcattcttatttaaagcatatagatcatggaagaatttcaaggtaccttgaaagttagaagtcaaaccctctacctggcggtatctataggcttagagacttctaaaagatttggccaattcaaaatagtgtccttaagaaaacactacagaaatcatcagtgagaaaaaagcatcagaaatactttttaagagcctggaggtagagtggttgaggatgggaagagggagagtaggatttgagattgacattgcagtaacttataagaaagatatttccaagggaactgtgttcattgcatttatagagccttagctattctaataaataatttgtataccctctgtacttttcccatgaatatgtttttactgttaattggtagctgatattgatgctctgattttgttgctttatttggtagcagggcgacagtaaacactttttttcctctagaaggaaactaaaccacacactctttccatgtatgtatagtgtgaatatattttaatttccagctttggagtcatgccatagattgtttcagcctgctccaattcactccaactttctcagaaggtcagtttagtcaccgtatgcaagtgagaagatgctgttagttgctacagtgtctttaataccctctctaacagggggtaatagagaagcataagatatgatcctgaccttagtcagcttatattttagcggggggaaaagagatgagaacaaaaccagaagaatcacagtgatagtgtctgagcagaagggagtgcattgagtcctcagaggagaaagtgacttggctggaggctcagggaatctttcccaggatgagctgcacctcggaggtggggtagcatttgagcgttcaaaggctggggtcatttcagatgagtgaggaccagcccagagtcaaggccttgtggaagaagatgggcggaagcaggaaccactcagggtctcaaggagctggctaaagtgaccccgacaagagtgatcacgatataaacctggaattgcacatttaagagtccaagtgcacatagatgggcctagtcagcagtgtcttcaaatttcccacagatgggaatgtccctgtcggcagggctcattctgcacatctgtccgatgggaatgtccctgtcggcagggctcattctgcacatctgtccgctgctccccctggtcggcttcatgcttttacttccccagacactggagtctattggagcctgcatagggccacgctgagccggggagaattggcctgtactgcagagggtgggtgcctggtggggggatgaaggagcagaagcaggagcctggggtgccaggtctggtggggtcaggaccccctgtgaggaggtgcgtgatgcctttggatcaggtgaaatggaggcacctgcaggacgcctgaatggtgggaggccgacctcgctgctgttgcctccctgaggcctctgccgtccctccgcggggggttgcacaggccctctccggggccttccccatttccagcctgtccccttcctgtgctttctccccatcgctgcccaagcaatgataacagaagacagatggaatttcacctggcctttcactgactccccactgccctcagagagcaccccaactctccagcaccccatgtgggctctgcactgccggccccttctctggcctgtctacccgccctggcaaacggctggcaagtccccagccttgttcctctgcttagtgtgcccttttctcccccaattcctacgcctgatttgcactgcggactctgcttgaccttgaagctcatctgtcacctcccagaggcctttctggccccactctgctgcgccatctctcttagcacagctgccctcctcatgccactctccccctgatctcgcctcctcgcttgtgcaatactgtagaaggcccttggttactccttcatggtttctcatttacattgaaagcaggttaatcttttctttcatgctctgatacatagcagtgtcaaagacctgaaactaaacccagtgtttaccgtgttttaggtttcttcattagaccattttacaagatgatgttgggaaagcagataaccctgaatgacatggaatctgtggtaagtaaatgcacgtcacacactggccatcaccgggcactcgtgtcttatgagaaggtattggagagccatatttgtagtctcagccacttttatgggtgttgcattccatgtgaacaacaggagacatttaattgcttgaaaagttcattgatctaattcttgtaataaatcattgttcacatttcctggaaccatggtacctagggtggatacatccaaatcccagttgcctctgcttacccggcataggacttgtgtgaacttactaaatccaagagacagctgaagatctatggtagcctgtgttttctataaaaactgctgctgctgaatgtttagagcttcatccgctctccctctgtttcctgacatcataaaaatggcagaggcaaaggtcaaaacaataggaagagtatcaggcagacgtcctagacatggatgagtgacgccacagctcaggcaagtgaacacttgagacgttctccaagtagtgatttgggttttcatgttgcatttaacattaattttacctagacagaccattttagagttggaaggattttattttttttttattttttttattttttgagatgatgtcttgctctttcacccaggctagagtgcagtggcgcgatcttggctcacttccgccttgcggattctagcaattcccctgcctcagcctctcagatagctgggattacaggcacacgccaccatgcctggctaattttttttttttttttttttttttgtattttagtagaaacgaggtttcgctatgttggccaggatggtctcgatctcctgacctcatgatcctcttgcctcatcctcccaaagtgctgggattacaggtgtgagccaccgcacccagcacggatttgctataaaacaaaaattgatgttctttttataatatacttctgcttctgtttttcttttaatgtacctataccccacatctacctccagagtgtatgggtgtttgcccacacgccagcacacacacagggccactgggaagcgcgtttgtccatttggggtatttgcagctcattcgtgtttgctcacttgagttaaaaagcccctgcatgatgtcacctgcctgtgataccaactgtattttgggcacggttgggtagatgagctgtgtcctcggccctgaccagcgctgactcagtgtttctgttgctcctcattgtatgaaaggagaggaagaggccagcagtgcccttgaacccactgctggtttgccagtcatggtgggttgggatgcacacctgtgattccggtctccactttgaccctgtgtttgtgctttctgctttcatcactgtatgatgaagcagctaggagcacaggaatttctcttaacgtctaactttataccacatgctgacagttagtgcctaaagtacagtgcgtgtattatttttaccctcttcacagcccgtcgtgtccccagcaggagagaccgtggagggaccagggacaggcgcttaggcctgtgactgatcctctggattctgaaaccagagcagccaccctttttgctgacattaacctggagagtgatcaaagcacaagaaaggggataacttaaaactattggtatttacttagttggaacattattttacttatttatttttttggcgatagaatcttattctgtttgccaggctggagtacagtggcacaaccatagttcactgcagcctctatcccctggcacaagtgatcctcctgtctcagcctcccaagtagctaggaccacaggcacacaccaccatgcctagctaatttctttttttttttttgtagtcatggcgtcttgctatgctgcttaggctggtcttgaacagcctcaagccctcctcctgcctcagcctcccaaagccgaggattacaggattataggcatgagccagcaagcccagtctagaacattctttatccttcctgttttcctcagatactttcactctttttttaaactttatttattttttatagagacagggtctcactatgttgcccaggctggtctctaactcctgggctcaagtgatcctcccaccttggcctcccaaagtgctggaattacagcgatgatattttcactctaaaaagatagaaagtatattgaccagcctggccaacatggcgaaaccccgtctctactaaaaatacaaaagtcagccaggtgtgatgtcacacgcccgtaatcctagctactcaggaggctgaggcgggagagtcactagaacccgggaggcaaagattgcagtgagccaaggtcatgccattgcactccagcctgggtgacaagagcgaaactccatctcaaaaacaaaaaaaaaaaaaaaaagagagagagaaaagaaagtatacttatgtctgtatgttaaattttgtagaccagtatggcagctccatccaccatccagagtaggtgccttccactgtgcatcactaaggacaggatttaactgcaagctcattacaactaaagcagtttgtttgtttatagtttaaagaggaaggtttggtttaggtggagcaggaaacattgcattagtaacatatttcttgagcattctgcacagaattacattagaatgtaattaaagaagtcaaatgagtttgtattttggggaaaaaatgctgaattttcactcctgtgtcattctgtaggatagtgaatattacaactctttgaaatggatcctggagaatgaccctactgagctggacctcatgttctgcatagacgaagaaaactttggacaggtacatgtgggtaaccctgggaactcttctttagctttcaaggggcatttttcttcttgacgggctgtaacacaactttgctggaccatcagaaacaaccagcaggagctgcaggtgttaattttcatctcattgtagcagcacctttttgtcatgccaagacgccacactccaattacaaccatttctctcttccagcaaagttacagaaattccaagaggccttggggcatgaaccagcacctcttctaatccaaagcaaatgtgaatgtttcatttgtgcctcggttttagaatttaggtacttgaaaaaatagtgagattgttgacttagcgatgtaaatacatgaccaggagtgggtgatgttggaagggccattggtttttctctctgttttatggttctgttgtcatggcgacatttgtcttgtgaggctcagcatggcaggctccggtttttctaccattccctctgctttgcccccacgctgttattcaggctggactaatcctcaaagtcagtttcagactggtcagcagggatttggatgggccactgaaagtggatttcaaaggtaaagttgcctgcttggaataattctcatcatgctaaggatctatgcgatgtatttgtctcaattctgaagcctttgcttcatctgccactcagtaataatgatgcagcttgggaggtgttctcaatgtattctctgaccctggtacctgtccttccgcaaaagcccagaggtatttcccatccttcagactaaatctccacggctatgaaattaattagaccatagaactcattgtaatggttgccctctgaaaaatgaaatagacgtgttctttattgctagatgtcaaagattgctagagaatctttgagaaaagaagctgatgccactagaggatttaatgacaactgagggtaaaaattgttggataagaaaataatcacattaatatcagaatcacttgttattcccatgtcctgtgtttgagccaggagagttcagtctctagtgtgagtcctggtgtgggtggaacctggggagtccatagggcccttcagtggctaggcaaggctcagagaaggacttcaggcaccagaggcaagagaccttgtggcttaatgtaaatgatcaagtcctttaaaaatctccttttgtgccccctccccactgcccccctttcccggcctcctccccaccccactgtgttgtgctttatgcctgagaatccttacagacaggcggacactgttctcctgcacggggaccttgtgatggggcagggaggggtcttttcagctgctgcccctctggtctccagcagcctccccaggaccgagagtactggtgtctccagccctgtctacctccttcctctgctgcctttgacacaaatagctcactccccccagagacacctgcaaggcacagtgcctttcactccgggctctcacccctccccactggtctccagtcccctggaagtgcatgctcctctgctggccctgtggatgcaggtgtcaccctgccagctgtcctgcacccgctgcttttttgtctcacccttgctatctggatttcctcatcctacctgtggctccggctgcacccatctccgctcaccaccagcctcttatctcaggccggcgtctgccttccagcctccagaattcccaggtctaacggcctcctcaactgcttctcctgagaggctcacgggtcccagtgctaaagccactttttcctccccagcccccacatcggttatggtctcatcagtgccaccactgtcccctcccacctgacacttgggcatcccctcagaatctccctctctcctcatgccatctcccctcctcatgccatctccccgtgcccaggcttgctgtgccccgtgactccccgtccttggcacgtccctgtctgtgcactcccctagccctgctccgatcacttcttgactgctgttctcacagcctcctgtcggccgccccctttcctgctttgctgttctccagtgccctgttctctagtgcctaccctgttctccagtgccctgttctccagtgcccgcctagctgtgagccccttatggactatttctgaaatgcagccctgaaaatgtccttcttctacttggccatcttgtgaccttcagcataaatgaaaactgttagcatggcatatgacccctcataatccagacctacccccctctggcattaccctctgacacctccttcctgtcaacctgtcaacaaacagtgtgccttcaagggtttccccagagatgcttcagtgccacattgctggctcgacactgcccactctgtaccgatgcattctcattctctctcccatcacctctttccctgccatcctcgaggtattgactgacgtgctgtgtgctgtatgccccctgaggtcttctgggtctctccagggctcagcatgtagttgatgcctgccagtgctcattgagcaaacgaatgaggagtgctaacctggcttattaaaaatatgaataaggtggtaagtaatagaaatcctaagtgtgagaaaacaaaatcagtcaagtcttggtggctttttttaaaaagccggacctattgaagggtcttaaactgccaattttcaaacgattagacatggttagtcaccctggaagtatcttcctttcatttttaacatatgaaggaaggagtggaagtaaagaaccaaggaagactgaaagtcagtcttgtgtgtcacatgcattaaaaaagtcttttcgtagattcattcatagaaaaccatatgaccaaattaacccaattcagaaaactattaagccacaatcagaagcaaatgatctgggaaaccttcctaattacatttaaatgtaattgtttccacctcataaatgaaagtcaaacacagggtgttggagtttttaagcaggcctctaataaatcttctgatgatcgttcaggccagattttcattaaaaacagttctcagacctcctcgtttaatgttgtgaattcttctgacttttgggtaggatcaagtagagtaatgcattaatcaaaacagacccatgagatgagtaagataagaattaggtgcccagtttgttgaattactgccttgcctttttgagagagctatcctgattaacagggaactcacgtatttattttgcactctgggaaggaatttagagcaagttaaatagctgcatatggatctcatctcccatatccagtccatcagcgagttgttcacacacctcccaaacctttctcatttctgtgcattctgccgatctcttctctcactcacacccaagtccaagctcccatcttccccactagacccccgacccgtctctacatccaatatggcttcttataatggcagagtggtctttttggaatataaaaatgagcatgtcattcctctgccagaaaccttcaggggtctcccctgcccttgagataaagaccccaaccttactttgtcccacaaggtcctgcgtggcctggctctccctgctcctcctccagactcactgtgaatcacaggccccactgggcttgtccaacacaagccccttcctgcctcaggccctctgctttctcttccatctgttgggagcatactccctcccagtctcagttcaggtgtcccttcatcagggaagccagcccttgacccagaccctatgcatcttccatgcctgccctgtggcatgtaccacagacgactttgcatttgtctgagtatgtttgtgtttagtgcctgtctctcctgctcagcttcctcccgatgatggcagccgcatgcctgccctgtgctcactcactgtcgtgtacttcccacaagcactttgcctggtgcatggtgggtacttgtagttgttgatgtggaaatctaggtgttagcatgatgcccggacaagcctctcacctctttggccctctgcaaaactgttgactctgacccagaagaaagcccattcctccccaatgccaaacagtcaagtcacttccacagtggggcaaagcaagtgcagttgtcatggggtgaaacagacatgcagtcagccttccacggtgtttcaaccttctttttttttaatttcacagttagaaatatcagaccatgaagtttggtagctgttccttcatgtaatgaagctgcagctgttgccattattttgcaatttgttttctttctgattggtaagaatctggggctgctggtttctagggcctaatatgaaagtttccactgaagaaatgtcagtgtttgaactatgatcctgtgccaagcaggaagaataagccgtacccccattcactgctgtgcacacatacctgcccccaccgggaggaggggcccttttagggctgtaacaagtgaaaattctttattgcaagttcagcagagcaacgtctaatttggttatgggtttgtttgtttgtttgttttttgagacagagtctcgctctgtcacccaggctggagtgcagtggcagaatatcggctcactgcaacctctgcctcctactttcaagcaattctcaatgcctcagcctgctgagtagctgagactacaggtgcaagccaccatgcccagctaatttttgtatttttagtggagacaggacttcatcatattgcccaggctggtctcgaactcctggcctcaagtgatctgcccacctcagcctcccgaagtgctgggcttacaggtgtgagccaccgtgcttggcctgatttgattgttttgaagagctgccagaagtttcaagaggctgtgcagtagttggagggagaccatgggcagcagccatataggaaggttctttaggatcgggtcgagccagtctccataggaatgattacccaaagggaacaaggaggacatcatctcagacattgaagtggttagtggccctcccagaagccacagcacattccacaggtgtactgtggatctctctgttaagatttcatggagagaggtgggccactggcagaaagaatctaaaaaggctctttagggggtgataatgaattaaaaggtagagaaacacttgggggaaggcagtgagtgaaaaggcagaaatggtcaatgagggagagggcagagcatgtcctggcggaagccaggagccagacgaagagcccggagctggaggtggctcccaggagcgctgaggccccggccccttcaggccagtcagggacacagaggggtggcacctggggagacgggaagtgggaaggctggcatggacttgctgcctccctgctgtcggtagttgcgctgctggagaggctggggaggatgaggaaggcctggttggtggagtgatgggggtgcagggtgctgactgcccccgaggccgtgccctgcaggatttgtgagcacccatcagtgggcgtttgcccagcagtgctccgtttccaagaatggagtctgacaagcagataagccttgctccacccaagtccagcatattccatatgagccaagctgtttctcagcagcttcccaggcagcgcaaagcatttatggagggtcagggagatgtgtgggaatcgggttgttaactggccaaggcagggagtcccccagaagttcctctgatctctgtgaggaagagagccaagtttatgctggggccagtagacttaaagaggaatttttctactgcagtgttctcccacgagctcttgctgagcgcctgctgtggctgggcattgtgttccttgtgtggggtcctccaggagcccaggcacaggagggcgatggcccagaaagccctgggagggcggggtgtgcgtttcgtggctgaaggtggcaagaatccaccccacagagcaggctctgcagactgctcaccagggagcagggcccctgggtgccagcaccagctccatctgcagttcgctgtttctccttggtcactttgctggatttctgcctccgggatgctgtccaccctcatgacgggggccagggcgctgccgcagcacctataggagatgcgcagggcagagagcagcccctgtgtgacgctgccccgatttctcccacttagggttgacactgtcacggtaccacccggtgttcagtgctgaggacatacagtccctcccctcctgtggtggcaacagctgatgttaagaagggacaaatttgggcgaaaggagaacacaggctgtagttagagtgatggtgagacaggaatgaaggcccgcagggaatctgtgtgcctggaggcgagcattagagtcagatagccgcctctccaacccccatggagcctcgtgcccaaccagcaaggactctggggcatcggccagtggcagtaagccagtgtggtgggctggacaatatgcctgcactgcaggagacggtgtcacgatcagcccccgacagccggtctcaaaagtggaatttgaagagtggtcattgcttctcatgaaagtgtcgccgtaactcatgaaagtgtcacctgtaacgaatcctagagggatgcatttctgtaccacggagggctcgagccgagacaccgagatctgggggcgtgacccctaacctagtagcttagggagcagaattacaaacccctcatcctgtgcccatccttgggccctctcctcactcccccacagagaaacccagggtcagaatcaaccatgagacttgacggctgcccacaggatgatttactgctgtgacctcatttagcatgggttagtgtgggcccattttttcttttctttcaaaaattatttatttatctaattataaaatattaacctccataataaaaataaagccagtataataaaaatatgtaaaataaataaatgtcacttattcccagtatctcaagaaaactcaggattaaaatttttatttacattttccagaattattctctgtaagcacaaaacagatttttttttttacagaagtggaattgtactctgcatactgttttcttttttattttatttatttatttatttatttatttatttatttattttgagatggagtctcgctctgttgcccaggctggagtgcaatggcatgatctcggctcagtgcaacctcagccccctgggttcaagcgattctcctgcccaagcctcctgagtagctgggattacaggcgtgagccaccactcccagctaatttttgtatttttagtagagatgggttttaccatgttggccaggctggtctcgaactcctgacctcgtgatctgcccacctcggcctcccaaattttttttattatactttaagttctgggatacatgtgcagaatgtgcaggtttgttacataggtatacacatgccatcgtggtttgctgcacccatcaacccatcatctacattaggtatttttcttaatgctatccctcccctagccctccaccccatgacaggccccggtgtgtgatgttcccctccctgtgtccatgagttctcatcgtttaactcccacttatgagtgaagctggaaaccatcattttcagcaaactaacacagaaacagaaaacagttttcaaattaatatatcacacataccttttcatgtcactgaatatcagtctataacattctaatgactgtgctgaattttactttgtagacgtgccatatatttttaaccatgccctgttggtagacgtttaggctattttagtattttctatataaacatataattctgtataaccctggaatactcacatatatacataatatatatagcatacaaatgtataatctggaatatacattttgtgtacttgactaatttttttccattgctataaactccaaaagagaaattactgtgagaagggatatataattttaaaattgtgatgcctattgccaaattataatatcttcagaaaaagattgaaccaattagactcccacccacagtgaaggggagaaccagttctctgcactcagcaacactggcttattttctctctcatccctgggcgctgcttttggaggaagcagagtgttttcctccttagccctcccctccccactttgtctgtggccgacccgctcattcagtagctctctggaaattacaactttcaggcaacaccaaagaaggctctgtgatcaaagagagagggctggatgaatgctggaaggagtgtattacagggattgtggatgcttatctacttgacctccttccccttccctgtgcgaggggaaagggtgggaggaaagattcggcttgagtgtagccgagctgtaccgaaagccttctcgataccaatgcctgggctgggatttattaacttgtcattgacgtggatctgataagaaaactcttaccgaaggaacaacaaggcagtctggggaggaataaatggggaaaagaagaaaagccaacctgggtttattaacacatagaacaaaaggtatggatgagcactgtccacgcacctctgagaaccagccacgaactggcagagtttcactgtagaaacatccccaccccacccccaagtggaagctgtttggcatcctccatccccaacacggcctgtacggggcaggagcagatgacccctgggagaaaatgggatgcactgggaagatggcagctagaaagggaaatggagaaatgaaggatgtcagcaaaaccggaaacgcagcaaagggattaaaattcacattgggcacagtgaagagttcagttgactttgcagaaatggaaagcatagtggaaaaatgagattccttcctgaataaagagaaaaagagaatgtcgagggaccggatggatgatgaatgtgttttacgttgaaaagccatctcagtgtgaatgggaacaagagccagtgcgtggagaagccgcatgagagacccaggtgtgagtgctcgggtcagaggggctcaggatctcctgggtgcaggtggcaggaccaaggaacccctggaggtggcctctgccagggcatagagttcatcacaacatggaacctccatccctcctgggtaccaccctaacacttactttggaaaaccctctcccctggcttggtttactctataatgcaaccagcaggcagaggaaaaaagatttagagggaaccccaccaaaatagtggcatggctttctttcagtaggagaggtgtaggtgctatatttttccaccttttttccccaaaatttctacaatgagaaaaaaacattttattttaaaatagtaggcctctctcccttccctcacgctggttactgtgctatgtggccttatggtaagctaggtctgggtcagggcataggagaaagggctgccctgattgcagctgcttttttcatgatcatgggtggtgctaagggaggaagcttcagggcagatgagtgaggagaaggcgtccaatgcaaataaatgccttcaaaaaccagataaatctgtctcttcagcctggatccttaagcttctttcttgtctttaagtttctgtttgcatttttgaaagaaataccatgcatcctttttttatgactagaaaatataattttcagaaacagaatgcattagaatttggatttctggagtcttgatgggtgtaccctgttcttttctctgttaaacataattagtttcctgataaatgaatagcagaggaaaaaatgttgctcttcattattgctaatatatgaagaataattaaaagtcataaataaccataaaacaatttgcctttaatgatagcatctttaactgtgtaacatcctagcaaaaaagcctcattggacattctcttgtgcacagagcccatttgccgggaaatatttctgaatacatgttgtcttccctttatagtaagacattgtcactcaataataatatgcaagataacttcgtgatagtaattgttgttttgtctttgtaattacagacatatcaagtggatttgaagcccaatgggtcagaaataatggtcacaaatgaaaacaaaagggaatatatcgagtatgtatacacatatttactgccttttctttgaataattgaaatgcatgtttggtcactgtcccttgctgaaacagctcatgcatttattatgggcatgagtttattggtcagttttcaacaaggtaagttcttttctggcttgggctaatgggaagttgaatatgggatggaaagtctgtcttgtatcatgactccattgagctgccctataaaggagcagaggagggagaaaaggtctatattattgagtaatacggcaaatactcttttggaatatgtggatatcaactaagatttagaattgcaacggagaaccacggtgtcagtgaccagcagggcaaaattaggaaccaacaaagaaaaaatattttgtctctctcccaacttcttttccataatagaaatgtatagaaatagttaaaatggataggaagaattcagcatgtgcaaccctaaggaattctttctggtatttgtaatattcttaactcaacttcagcctcagtggaacaaaatgttgagtctttttggaagtctagctgttaagtgattctaagacatttgtaccaggcagaagtttttctctgttgggcacgttacgttttcttttttagtgtatatgtgtgcttcaaatgcataactctgggatcttccaaggagatcccctggtgcaggggtgaggtgagcactgcagtgtgtggttcctggcacctggtttctgctctcttgtgggtcgccacagtggccctgagttcctcgtttgcattcagtgcttcgtttcaacaggctaggctccctcctttcttctcatttggaattggtcagaggtcttgaaatcagacagctcttgcattgactgtgggtcttagcacctttcagtgtgatctgcaaagaaaaacctactgtccttcctaattaggaagaaacggagcgtgttagagtctctactcagagatcctggcaaggagtggaactattacatggcggactcttttcactctcaagttgaaagcttgttatgctgaatacatagactagaaataaggtacctcggttcttacctggccacattaattggcactctcgttctgaatatgaacaatcttagctgatgacatcctggcagacaccattgtcttccttcagaaagtacagactgtgagtggggtttaaaaaatattctagctcagggtgacccaggtctcaagtctgaggactctgacatgcgtggtatgtgtcttgcatcattctttgcagttaattcttttagggttcaaacgtggtgggagtcagggccaggcagggttccagctagctttacttttaaaagtataattgaaatcaccaactgctccctgatacctctgctcccctggtgccagaagaatgctgttgagctgttcattgtagcccaggaggtgccacctgagaggccgcacagtggttgtgctgcaggctggtcctcagggccattaccatggttacagtgtaccaccccgaaggtgagaacccttcagaatgatggaatgcctgagatgacatccagagtacatttgccttgcgatcagttttgctgtgcattaaacactgtcgcagggaacttggttttggtgaacttcagttgcataaggaggtcttaccattcatcctctaaattttggcattaaattatgagtgcaaatcattttgctgataaagcttatatgttattgttgaatattagcacattggatactagaatgaaatattagataactaaatgcattgtcctgagtacactttacaaatatgtatacatatatgtgggtgtgtatacgggtgtgtgcatcttatacatgtatacctgtgtgttcataccccatgaacttttcccttttctccatgttgtcacattttaaagcagttaaagcatttaaagcattttaaagcagttaagcatttaaagcagtttaggtcagccaaaccttgatgtgggggaagttaattactcttttgaaatctccagtgagattttaggtttttcacgggtgttccagggagtcttgaaagaagccatgaataaactaaacagtgggggcacagaggagaccctcccctctgctctgctgtcgtggatggaggagaagcactccctgttgcggagaaagcagtgagcactagtgatgatggaggtggttcaatattgtcctcttttctcctgcagcttagtcatccagtggagatttgtgaacagggtccagaagcagatgaacgccttcttggaggtaagccatgctggccagggttctctgccatgtgcctctggtcccgggtcgatgggggatcgcgcttctcctttagctagtgtggtggagctgatcagagacagaggcgaggctggggaccctgcaggaagaccgggatcgcacagctcacaccgctggccagtctccagcacaagagtgttcagccaccgtgccgccacctccttttccttttcacgggttctcctgcttgacttctcttatttttacatttgtcctgtttttaaagaggacgttttacagacttgatctagaaccattgtcttggagtttcaggcggtacccaagagaaggctgccttttgctgcagtgacaggttccaagaagcccgagggctcagagctgaatgatgaagcgcagtccccaaagtgcctggccacccctccctccctggatcactgctgcctgggcttgattgattgattgattgattgattgattgattttgagagagattctcactgtcacccaggctggagtacagtggtgcgatctcggctcactgcagcctctgcctcccgggttcaagcaattctcctgcctcagcctcccaagtagctgggactacaggcacgcgccaccacacccagctaatttttgtatttttagtagagacggggtttcaccatgttggccaggatggtcttgatctcctgacctcatgatccacccgccccggcctcccaaagtgctgggattacaggcatgagccgccgcgcccagccatggacatttttttttaatcccctgccctttttctttgtggcataattcattgcaggttctcttctatacagatacatggaaaacacattttcttaagctgagtttttatttattttatacccagccacctcatgacagcttttaccctgttacagagcaaagtgggcactgcccagatcgaacttttaatatcagggatgctcccaggcccctagcagtgggtgagggattcatcattttaaacagtattccacttggaccaaaagcaaaattctttcttaaatatgatatagtattagttacctcaaagatcacacaggaaacagcctcgtgtccacgtgactgattttctctgcactgaggcagagctctcgtggggtgatgctttcccttcactcaggtacctacacaggatgcgtgaaagcccgggcagcacactcagaaacagctcggggccttagggacttaaaatgggaggacagaatggcaggtttcactctttatttagataagaaatcccaggaagcagattcctgggccccaccgcaggcggtccacaccttcagaaacgcggcgttcgcagcgcgcagggcccagcagagctgagctcatcctagatcacgccacagttagtggtacctgggaactggagcatggttttctgtacgcacagtgtctgcacccatcacctgcctccctctgtgtttcttctccctgcctccagcacgttatttttaagcgtgtctcttacacatctgtagcctgtgcatcttaggacgcactgactcacagcagtgttataaatggcttttggaatccaccctgcctacagtatcccatattttcatcaggtttcagaaattactccactacttgaatcttctagattctatgctttttcgaaactgttatattgtgactgtgctgtttttactggaactatagttacttgatactgtcactgacataggaatcatcaggagagattatatttttttctggctaaccagaaaagtttgtttttcctgtgaaattttttttttttgaaggcaataggtgtttaagatgttttttttttttctttcagggattcacagaactacttcctattgatttgattaaaatttttgatgaaaatgagctggaggtttgtattataaacattattttatgtaaagtggattttttaaagtatctctcattactttacaagtaatattttaatattcttggatccataatgtcctagagagtaactttagatgaattatattacatgtctcttatagggcttatttgccaatgtggttctattacatgtctcttatggggcttgtttgccaatgtaggagtaaggaacagcaaaaataatcagctgtagttgccttgtccatcagagggcagttctggaacatgcctagtaagtagaggccactgagcagagctgggatcatggccctatgcaccaggcgaggcaaattgccacaacaagtagaaacaaggtttgcagtagccctctggacagcagaaacctgcttacactaccagactggccaagtatcctctgctgcatccccatccacccccaccgtggcagccaaatgggggtcttggccacaaggtggccgtaagcatctacttgggcctgtagaacgacgtctcattgaacttgaagtggtttatgttgagtgaggaaaaatgtcagaaggcaacagggttgtagcaaaaggtagtttagtgattgtctagttcagcttcttggtgttgacatagttgagtaacagccattttaaaaacaaaggaatatctcgccctttgttgtgtcgagagaaacaggggaaagactgtctgttgagaagccgttggtgggactcggccatttgccccgtccatagccagtgagtgtttcccatacactggccttctatacttttatctcaaaacagaaagttcaagatcgatgatgtctatagaaatcatatacctcaagcctttcctctgataggtgggaaactgaggcagagagcagctgggtttacccagcaaggttttggcacggtcaggcctaggaactttatttccaggcttctggcttagttctgtttccatttcattctggtacctttgcataaatatcttccatttgtccacaggaaacctcccctgatggagagttgcataataggaacggcaaaccttagactaaatgctaagtcgaagacccagttgtgccttagcgtatgtctgccattcttaggcctctgggcagatgaggtgatttgtcatcactggaattgatcaacctggaggagagtcataagcactaattcttttgtgggtagggagatgcttttagatattcagaggaataacctctcaggaggagaagcagccagggtaatgcacagatgctgctggagcgtgagagaatccacaggtcccatgcgtaagactagaggggtagggaggacgactgtggcatttttatatccgatacgacatgccgtggcttgcgcaaggttcgaattgagctgccctcgtgactgctgcctctgtgatctgctatggcaggtggagcctggaacaggtgtctgccttcctctgttgttatgatttgctagcttaccttcgcggcacagtgaccacatgctggcactgagggtggtcatttctcagtgtgtgatctcgcacctttcacatcctgcttttacatctggtaaattttcttcctagttgctcatgtgcggcctcggtgatgtggatgtgaatgactggagacagcattctatttacaagaacggctactgcccaaaccaccccgtcattcagtggttctggaaggtaactccggggcccagccccagccggtgtcctccacctgaggcaggattgagggctgtgtggcgccctccattgtggtctgacttcaggactgatgctggctttggggtctgttagagcttggactgctgggggagggaagaggcaaactgagccagcagccccgtggtggctcctctgtaactgtagcagacagctagacttgaatgaagttggtccctacaaaagcacactggccttccttgaccacctcgtgaaagtgacttttatttgagggactggtcctccaatgcgtaaatagaaatggggggcttctcagggcagaaacaggcttcagggatggctttgcaagatgccactttctgttaagaagtcgttttctcaatttttaaaatatattccaacaaatattttgatctgtgtatctttcaaccaaagataacacaacatttgatttattatcttagggccactgtttgtatcctgttcagcttaggagggaagtaaaataggaatgggttagtccaaaggagatatagtaaacaaacttaaaaaaaaaaaaacagttatcccccaaaaaggctgattatttacttcaccccaaaaaggaatcatttaactttttcaaatttatttttatttatttatttatttattttaaagatggggtctcactgtgttgcccaggctggattcaaattcttgggcttaagcaatcctcctacctcggcccctcaaagtgctgggattacaggcatgagccaccatgcccggcctttttcacatttctaaatgccttttattactatttcaaatgccagcaggaatacagagataaaaaagcaaaatcttcaaagcctagtccaggtctcacttggcttgttttagatgtttgcctacagcagtccaagtggcattaccagtaaagccacctggattcccataataatgcagatatgtaagatacacagattattttagaaccccatctttgcctttgttgttttgtttttgttttgttttgttttgtttcattttataaaatgatgtcttctagggaacgtgtctacaatctgaaatcccatctcataacctggcttccccttgtgatgacaaatcttaaatactgtatatttataattggcttagggggaactggtaagcctcgaacacagaaacatgagcttggtgccatcagagagtttgctttttatatcatttattttggcctattggcagaagaagaaagagacggacattgtgatcactcagtctcttagattagagaggccagctagtattgtggccataaaaaacctactcagttttcagagtcaactgtctaggtcttacattgcaatataaataagattaagttctgcctgcctgcatgacagcagcatgtgccatgggtcacgtggggggtataatgaccttctgcctctgttcataggctgtgctactcatggacgccgaaaagcgtatccggttactgcagtttgtcacagggacatcgcgagtacctatgaatggatttgccgaactttatggtgagcaggataccattggattcagttgtcctcctgggaatttccagccaggcatgaactctggcccaagaaccctgccgccaggcctctgcagaaggctaagtttcaggacagtgtgccatgcataggttccatgaaagttcaatgaaagtactgttatctatactttatatagataacatggtgcttctacttcgagggattggggggcagtttgtgaagaggtccataaggctgctcttttttttttttcctagtttagttttttagtaaatcgttaaaaactaggttttgtagggtcatttatatggtcgtaaactgaggtataaagtcacctccagtaggcagaatttttcagtgtttaccatagatttaaaaatcactctgtactttgcatactgaaagtcacatttcattcaccctcccacccacaaaactagtttgaagtttaaatttccagggcccagctgagaggctgtagctgcctgcctttccacgtaactgttgtgtttgttaatcttggtgcagttccattctggagactaagcagagtctttctgtgaggttgtgcagacctctggcttccctcaacattaaatatcaatgttgcagcagaagagagtgtcttgggcctcacccctgggggcaaaccctgccctgacagtagctggactgcagaccacaccatagcttcattcttctgccccaagcaatcttaacatttctttttcttttcttgtctaggttccaatggtcctcagctgtttacaatagagcaatggggcagtcctgagaaactgcccagagctcacacatggtgagtgacaaaaacacatgcatgtcaatgcaatatctgaactgcttagctgggtatggtgctgggctcaaggctattgaatgctctgtttcctgtctgtaagtagcttagagaattaaaggacagtgatgtggatgaaaatagaaattgtacagtagtgctaataagacataatgcactcagtatgtttggcacataaagggctcaggcctccctgctgtggggaatttctcctctgagcccagtccttccctcattattctaggtagtggagctttcactgttcagcatacatagataaggcagctctcaacctgtataataaacacgttgggtttttactccaaccttaaattggttgagaagttaggacaaaataccctgtagaaacatcctttttcaaaggccttctatgcccatgaataacctgtaattccctggaattgagcagtaacatgactgtggtcggaggagggtaagagggctgacacgtggccagggatgcccaagcgtggagcgtggctgccctcagaaggccctctcaggaggcacagtgacgcagaagggtcccagttgttttctgaacagttgcatgaaacccagcacaaatgcagactggatgggatcagtttcttgaagccgggttcagggagctcttgctaactcaaactcccatgtccctcgtgttggtttttctgcaaaggcctttatttcttgctcctgaggaagcagcagaagtgggccttctggaaaacggtgagcagcgtagccctgtgtttctcatgcagcgggggctgcaaagcctgctctggccatagtgagctaacataagcaaccaaacactccctgcaggaaacgccctcccttacactagaagtgctggccaggagagaattctcatgaacatgtgtttgcgaaaaattggctgtgaaaggtttttcacttctgtcggattcccttgcctcaccagaaaggtgttttttttttctattcgtaccattcacgtgactctccagatggaaacaatgtggtcattgcctgtcagagccttgaaagcaagctgactccagcctaaaattcatgaatattcagagcagtcattgtccgtggttctctggctttattctaagggaagaatgtttgagtagttcagagcttttatccaaatggtgtccaagtcatatgtggttttctgggttctactggcctccatatgaaggcaccagcgttgagccaagccccaggactgtgggtggtgatgcgaaactcaagctcataatactaaccaggatgaagattaggaaaagcgaaattattgggcacagtcatcatctgtggtcaggcactgcttaatctttatggcagccttatgagatatgttattcccttgggctgtcagaaggctggcccagggctcaccagagtcacagattcccagatcacaggatttgaactcagagctaccagaattagagcctgcaccctttaccactacaccagatacactgcctctgttgatatacccactttctttttagacttttccaaggaaaccaaattagtgaaccaatttcatgttcattcagcccatgtttctctgtgacttcagggacacatatcttactattgaactgtcttttttatttcggagcccacatgattctgccacaagtagaacttcccagataagacctctgaactcagtggttctcaacctcagctgcatgttggaaccatctagagagccttaaagaaatcactgatgcctggaatttggacttcattggtctggtgtgtgacccaggcagtgggattttcaaagctccccagatgatttttataggctggcagggttgaaaattcacagctcttccctaggaagggcaaagatccacctacaggaagggaacaacccagctggctcttaccagaacttattttcctctttatgtgtcacggaaataaagcaactgtgtagttttcctaatgatgttctccccagactaacttgacccggatggagaggactggcagttgcaagcaacactggctagcatgagtgggactgttctgctgtttcttctaaatggctttcctccctacctgaccctgactgtattttgacataggaaacagaaacttcactggctgtttcgtggcaacagttctgccataaaattttgccatacataggtttaatttcttccacgttttatgatacacaattaaagttcagaataaaaatctgatttcctagaagagcagaagctgaaggatctggttctctgtgatgagggtacctttcattaagctttccaatggtgattattgagtgtctgacattcaaaggacttcatttcattgttctataaaaggtcactactcagacatttaaaattactcttcattaagaatcacaggcccacctgcccttttaggtagactctaaagcaaacaaaaatcatctcgttcagcccatgcatcttccacgtgaggacgctgaagccctgtgaggacaatgagctccttaaagtcacccagctcattagtgcagagcaaagccaggtccgtgtgtcctgacctctgaaatgataggaactcacactcaccaagcactctgttcattccggggatggtgctcagcacttgatgcgattgactcataccatcatcacagtggccctaagaggtgggtgatgttatgacccacttttttacagataacactgggatgcaaagcggtgaagcattaagcagcatgattcagaacctcagatcttgacatcccgtctttgcctctctcttcatcatgccagtgtttctcaaacctgaataatctgtgcaccttttttaaagggaaaaaatggtcacagattctcaagaatgggcctgagacccccatagggattgcaggcccgggactgtgaaaccccagctgaaaagcctgaagccactttcggtgaaaggctcttttaaatgccatctgtagatgtgaagtcctgtctttattaatatgataatagaaagttaaaagcctgtattagtacttgctcttttaggattcctgggttcctgagaaccccagtttgagaagcacagtgttattctctgtcttttagtgtttagtggctgttagagaatccaagtggaactcagtgggacttattcaatatttagtggttgttaaacggccctctacggtatgtgtttcttttctgttgctgtgacaacggttagcttttagtatatgtgcaagtgctgccaaagcgagcacgtgaatggttagcttttaaaacccaagaagttactttgctcattcttggaatcacacatcaatacctggagggggcggttttaaacacagtttgagcactcgcggcagaggcagcacaagtgcacttcaagagctgggctttggagcaccccagggctgtacctggccccgtgtgaccttgggcaagttacctaaccttgctgtgtctcaagctcctcctctgtgaaataggggtgaagcattagctgccttacaaagtgattgccagggttcataacattgagacaaggctgatggggcatggtgagcactccatgaacatgagctcttacgtcataatgagctgtggcaagtgtgcatgccattttcatgacagatacacatcagcaatcaccccccaacacatacacacacacacagaggtgcaggttctgtggctaaaggctctggtcttgagccccatgtagacatacagtaaatgttgaaaggtgttaacactgataccatctcttgagtaattgagcccttgctgtatgccgggcccactgatccgatccacttggcactcatatgtgcagtttccccatgtcacagaagcacagaggccatccatttgtctgaaaaccctcactattgccagggcgatttgcagcccccgcccccacctgaagcctccagatatgtagggactttttctaaatgcaactttacatagcaaatgtcaattttgcctgactttgatcagaggaggtagcttagcactggtgttcccgagccccggacagcctgggttctgtttgtgggtctgccgtttgacaaagactgtgacctcaggaaccttgccctatgtctctgctccaggagctcctgtgcagaatggagataacatgacctgcttcatagggttgtgatgaaaatgaagtgagttaatagggagaaaagcacttggcttgaggcctagtgtggaataagtaatagtattagagatagacacagtcttaattcgtgggtaactccaaaagcatcagctctgtgttccaagggtttggaaatcttgccggttactcccttcccaccaggattcctccgagatctgcatctgactatagcaaaggtttcatggaccatttgaaaatgttctttctctgtaaattacaagagcttatttagtgtggatgtttcatagctagaggtttttggggtttttttctccaggtaatcaaaattgttggttaaggcttttttattctcttactcaaacctcatgccctattaaccagatcgaggaagtgctgttgtggcttttcacctacactttttgttccttttgcagctttaatcgccttgacttacctccatatgaaacctttgaagatttacgagagaaacttctcatggccgtggaaaatgctcaaggatttgaaggggtggattaagcaccctgtgcctcgggggtggttgttcttcaagcaagttctgcttgcacttttgcatttgcctaacagacttttgcagaggcgatggcagagagcagctgcaggcatggtccctggagccgagccttcaccacgcactcgtccaagttcggatgcgggaacctggtcccagcttgagttcctgcctttcccaccacaaattatcaactggttgatgtgtacactaattacatttcaggaggacttaatgctatttatgttgtgcctctgcaggcaaagcccttaataaatattttacatcctttctaatgacaatgaatggaattaatcactcaacaggtatagtattacgactcatgtttactttttaaaatgatttagaccgattttcagattttatttcgttatgattaaagatgtctcatgtacttggaaaagtgagcattttttttttttttgtatttcactttcataccaggcttaatgtcaatgacatttttatttttgaagtactctgacacctccaccctctactttattagaattggaaggcaaatttttgtccaaaaacctacagacaagtactttgagagaatttccaatataatattagacataatgataattttttccatactcagaatgaaaaactggatattacgtttttgttttggggtttttttgtacaaatttagctaatagctacaggctgagagaattgtaacatagcatgacaaattttgtgttgacttgaaaggaatcacaccattattccttagaagtaattacatgtgttctaacacatttgagacagggttggactcccatttctcatccgagaaattacttaacccttcctggcgctgtacagtcatcttttattctatttcctctttgctgtttgtagtagagacattttgaatgaaacttggcactgcttgattcaaaactgtggaaaccagatctgtttagtctcctgtttgtatgcgtttgctaatggtagctaaataaccagtttttgttgtaaatgcaccaattctgaaggcactttatgtactacatggaggtcatatctggttttgtttttatttttttatcatgaacattaaatgtgatgatgatttcttttccctgcacacatctttccggtgcaatatctatcaattgtgaatctggctgctggtgtataaaaacctggatgtaaagctgagcctacagacctgtcctcaccaactgttttgtgatttctactcaactacaaagatttatttaatgtactcttaatctaactgagttttgttaccaatgacctgttgcatgcttcaataccgtgtactgcctgagttgtgcctcttgtgtgctagattaaaagtgagacagagacttgacttgatcctctgagctcaagctattgagctggtagtggcagaggactgagggtacctgcacagtttgattcttttccacgtgtaagtctccattgcagaattgtcgtgctttgagaaaacacctgaggcagtgtgggagttgaacgaccctgctgtcctttttaacctgtgttgtcctagaccctgtcggggcagtcaggggacactagagatttgatctcatgcgagtcatcaataggacaaaaaagttgtggtttggggaggtctgtttgttacataaaaaggacctttcggtgtaagaaattgccgtttttaccctgccctggctggcatgtgagaagccatggaaggttgtggttgtaaatgagttgtctaaaggggtgcagaggcctgaggtttctaaaagaaggtagatttctacagagctgagtgttggttcctttttcttattggttgaaaattacctggtagtgatcagaaaacttagatgctatgtaactaaaaaaaaaaaaaaaaaaaaaaaaaaaaaaaaaaaaattcccgctcatgagttttgactattggtgagatgttttccgctacagttaacatgacaaatgtctcagtggcaaaaatcccctttttgtaagcccccatagtctagaggcagttttctttttaagaatcatgccagagcctgagtcgagcagtatgctttcttggtttttgagagtaattgtgtaattgtagagggagaaatccaattctaacctaagaactgggattcttctgtcatcttgtaaaccgtatattgaaaaaaacagaatgtcactaaatgcatattaagtcaagtattggaaagtataaaagaaaaatcattctgacaatttctaagccagaagcaaacaagaattactgaaatctaccccatgaatacttggaaggcagtaattgtgagtgacacctcagttcatcaaccccttaataatatcagcttaattttaatgacaactaaatatgctgaagtgaggatttagtattttttaaaaaagcaaaacaaggttcagtagtcctcagcaattctccaagtttctctctttgcctaaaatggtcatagatcttgatttctctgaatcgtgatgaccacacccagtcatcttcacagcataattgcaggtggcagtaaagagagtgtgctgggtaaggagcagttgctgggtcattccttgggccccgacctgcccggggagtagccctgggggagagagggcagtgttgcctatcccagaggtcccagcagtcacactgctctgcaggccgggctctctttatagccagagaaatcaccttaatgcagtctctttagttgtctgctgaagctgtagttattatgggccacttacatgaggctgagaagtacgtgccggagctcacacactgcctgttgcggttctcttaacatcagttatcacagctgcctgtgggtcccgggtatttccattcctgccccttgttggcccgaggaaggatgtggaaagagcacctggtgggatgaaggtccaacagcctgtgcctctccactgctggccctggagccggcagcagtgaggcattcattgtctgtgttgcggtgtattcccagcttcagtgctcttttcctttttgcctgaaatgtttatgcttctctgcagccagtcctctaacaaatctcaagaacaaaggtaagacacttggtttttgtttccaggacccttcagaaggtgacatcagatattccctaaattcagacaatgagggatacagagcgacttggcatgtattatttctcccatgtaaggacaaagggacagattattattgttatttctgagacagagtcttgctctgtagctcaggctggagtgcagtggctcaatctcagctcaccacaacctctgcctcctggcttcaagcgattcttctgcctcagcctccccgaatagttgggattacaggcacccaccaccacgcctggctaatttttgtatttttagtagagatggtttcaccatgctggccaggctggtcttgaactcctgacctcaggtgatcctcccgcctcagccttccaaagtgctgggattacaagcatgagccaccgcacccggcctcacagtgacagattctgagaaacagcatgcaaaacatttgaaccattttctacatctcccattgttgcatagagagtgtgcaccgctgctatcttgccagatccacactggtcctcccgaaagccaggttcatacacagcaactttttaattattctaacagttacccattaacagtcgactcctgtatttctgagagtcttgtactcacctctgaaatttaaaaacgtataaagagagcctgggttaatcagttctgcagcccctacgtgacactgtgctagttctccttcttctgtctcctccttaccctggccctgcacccctgtacttaagagggagaggtgggaggtgctgtctggtatcatttgctgcctcgccagtagagggtgccgctgtgcagggtaactgcccgcctgctcccttcctgacctcccctgaccccgaagatcactacctctgtcattcaggcattggggtacatcctgataagtcgtgtcagaactgccaatttcaggactgagatgtgtttttaaaaaacaaatccttataaactccactttgtactttagattttaaaactggggaaaaatgtgatattctttggaccacttttttaatttatataagccttaatgaacagtgtctatacatttgcatacacacacccccaccccagagtgttctcagtatgtcagagaaagtgccacagcattaggacgggagcttggagaacgttttctagaaaagggttagcttcctgttggcatgaaattttccaagcaaacctcattaaacatctgttgtttgttaaagatgttccactgaaagcaacgcatgtttcaaaggcacgtctttccgttcgttggttttctgtgtgtaaggagtagcattgctgttggcgcctaacctcgcgtgcactgcattctcaaccccgtaccagtgcatcatcagaagccttcctcgtgaccataactctgtgtctgcagatatgtgttcccgtgtaagccagttttccccttttactcagactgatttcacctagattgtcacggtttccttcatgttaactttgcgtgactttgttcttcctttactactctgtatgtaatatatatacatatatacgtacatatgctgtccaaatatatttgtatatatttgtatagcatttttacacctttattgagtaatctggtttcgaaaggaggtgagagtttagtcccttctgcagttttctccaagctgtgtcctgtgaatttcaacccttggagcctaagaaaaccctaggaagatgatgttaatttgctgtcatttcctaattcaggatctatcatcaaatgaaacatgaaaaaaacagtgacttttaaggtgaaaagagtttcaagcattccaaataaattatcaatgtttcataactttttattataaacccacctcctaataggaagccaagtactatttgatacagtggtaaaaaccaaactaccttgaatttttttaaggcaacttatgaataatgctcattttcacagtcagaatagctttaaaatatggttgaatttgatacacacaggaagttttcttgaagaacaatcctttcgcttttcttttttcttgagagatctaaagagaaactgtagattgttttcctgacagcaaaagactaatgtgacaaaatgaagtcattgtaaagaagcgatgcaacttgtcaaatatttaataaagaattatggaagctggaacattttctacatcaagtgttatgggttgtttgatttaaagcttctttgtgaatgcaccatcttaattgttgtcagaggggtttaaatgcctgcagatttatagtatgttcatttccttcatctccctaaaagcgccgcacttttaaaaacattaaagtctggcagggcacagtggctcacgcctgtaatcccagcactttgggaggctgaggtgggcagatcactgaggttaggcattcaagaccagcctgaccaacatggtgaaaccccatctctactaaaaatacaaaaaatatatatatatattagccagacgtggtggcgcatgcctgtaatgccagctactcaggaggctgaggcaggagaatcgcttgaacccgggaggcagaggtttcagtgagctgagattgtgccattgcatgcactccagcctgggtgacagagcgagattccgtttcaaaaaaaaaaaaaaagtctgcccaaaacacatggcttaagcctactaaaaggatgcacatttattcttatccgtctgctgttttgttcttttattaaacttgagaattactgattttacgtaacatttgtataatccatgttagtctgttcctcaaaaggcatccttgtatacctagccctcaacttgtgtgagagttaataagactcaataatgaatccccaagttgcttctcagaaaggtgctgtcagaatcccgaccgtgtgtcactgccctgtgcaaagccggtggcatttttcctcatgccatttcattccgctcagatcatctcagactcctggagaattttccctttttctttagtactgagcttcctcttgatgtgcttaacccatcccctcggggcagaggagatagctagcggggaagcaggacatcatttagtctttggtttcttgcggcttgtctttttccattaacagtagatggcatcttgccagaaagctgtccgcagcacttggaattcctgcctcctcctccagggttatgagtacacatgagaggcacaattggacagagtcactgtgaatatttatatgttctttcttaaaaccacacatggtggaacgaattacatcaatgacacagttgctagattaatacgcttttaacctgctctgaagtccaagactcattaggcacttgtgagatggtgaagcccctggtaaaagtgtttgcggtgagcatgggtatcctgaattctgacactagctttctcggggttggctctcagagccatgttcaaaggggttcctgaggtaagaacgcagaagcctctttctgggagagaacacttctcaaaacagcttccagagagctcaggctgtagaa

SEQ ID NO: 184 - protein, 950 aa, Homo sapiens
MRRLAFEQVTLGESRILRVKVVSGIDLAKKDIFGASDPYVKLSLYVADENRELALVQTKTIKKTLNPKWNEEFYFRVNPSNHRLLFEVFDENRLTRDDFLGQVDVPLSHLPTEDPTMERPYTFKDFLLRPRSHKSRVKGFLRLKMAYMPKNGGQDEENSDQRDDMEHGWEVVDSNDSASQHQEELPPPPLPPGWEEKVDNLGRTYYVNHNNRTTQWHRPSLMDVSSESDNNIRQINQEAAHRRFRSRRHISEDLEPEPSEGGDVPEPWETISEEVNIAGDSLGLALPPPPASPGSRTSPQELSEELSRRLQITPDSNGEQFSSLIQREPSSRLRSCSVTDAVAEQGHLPPPSVAYVHTTPGLPSGWEERKDAKGRTYYVNHNNRTTTWTRPIMQLAEDGASGSATNSNNHLIEPQIRRPRSLSSPTVTLSAPLEGAKDSPVRRAVKDTLSNPQSPQPSPYNSPKPQHKVTQSFLPPGWEMRIAPNGRPFFIDHNTKTTTWEDPRLKFPVHMRSKTSLNPNDLGPLPPGWEERIHLDGRTFYIDHNSKITQWEDPRLQNPAITGPAVPYSREFKQKYDYFRKKLKKPADIPNRFEMKLHRNNIFEESYRRIMSVKRPDVLKARLWIEFESEKGLDYGGVAREWFFLLSKEMFNPYYGLFEYSATDNYTLQINPNSGLCNEDHLSYFTFIGRVAGLAVFHGKLLDGFFIRPFYKMMLGKQITLNDMESVDSEYYNSLKWILENDPTELDLMFCIDEENFGQTYQVDLKPNGSEIMVTNENKREYIDLVIQWRFVNRVQKQMNAFLEGFTELLPIDLIKIFDENELELLMCGLGDVDVNDWRQHSIYKNGYCPNHPVIQWFWKAVLLMDAEKRIRLLQFVTGTSRVPMNGFAELYGSNGPQLFTIEQWGSPEKLPRAHTCFNRLDLPPYETFEDLREKLLMAVENAQGFEGVD

SEQ ID NO: 185 - DNA, 1080000 bp, Homo sapiens
  CDS (722487)..(722534)
  full length exon 1 range is 722213-722534
  CDS (843242)..(843315): exon
  CDS (922549)..(922630): exon
  CDS (926021)..(926059): exon
  CDS (929123)..(929176): exon
  CDS (993104)..(993154): exon
  CDS (999547)..(999608): exon
  CDS (1000354)..(1000456): exon
  CDS (1002118)..(1002284): exon
  CDS (1006117)..(1006249): exon
  CDS (1007860)..(1008036): exon
  CDS (1010940)..(1011014): exon
  CDS (1018160)..(1018291): exon
  CDS (1018800)..(1018919): exon
  CDS (1020028)..(1020225): exon
  CDS (1026659)..(1026736): exon
  CDS (1028113)..(1028167): exon
  CDS (1034316)..(1034374): exon
  CDS (1041390)..(1041455): exon
  CDS (1043121)..(1043350): exon
  CDS (1044868)..(1044989): exon
  CDS (1047519)..(1047589): exon
  CDS (1050296)..(1050391): exon
  CDS (1060368)..(1060441): exon
  CDS (1062648)..(1062708): exon
  CDS (1064561)..(1064620): exon
  CDS (1066207)..(1066314): exon
  CDS (1067768)..(1067864): exon
  CDS (1068609)..(1068681): exon
  CDS (1073289)..(1073388)
  full length exon 30 range is 1073289-1075279
tattgtttttaatttagtttggctttagacacatggttcaacttggcctagttaggtctgggatttactggtgcctctcattcatttcatcatgttgattaccactggctttttccaaattctgttcttcatagtaatatgtggctctactttggttctcccatttcctttgatgacgtgttaatattgaagggcaaatggaagccctagttctgaatgttatgatccatgattgcccctctgtcatatccagtgctggtaggctgtgaagatgggccgggggagatgttgtcagcaatcaggggtaggcatggcaaggactgtggaaacagacctggctgagggtctgtctccaggatataagtgagccaaccaatggccaggagccaagaggcatggccaggtggtctccttgcaggtccgagaagtctcaatctggttggtggaggctgtttacagagctgaatccacaaggagattggatgagattgagtgcaaggttataggctcaatatggaacaggaggtccaggtggggaaactgaggcagagtccagtggtatgggctaggttaatatgggaaagaagggggcaaaactgtttatgtgagatctgttccatccttggcagctaacctaattctgcccttctaggctgatgtgccaggtttgcctcagtcaggatcgtctgttgtctggatcagggctgagcacatggatagccatggctcttgctcaggagtgcgatggaagaagtggctaatagcagcaatttggggagcccattatgtgagcatcagaccttccccagatacccccacctcactggtggtgaggagttccccatatgttgccagaggagtctggcggggactctaacagtgatggtcctttattacctgcagtttggcagggaaggaacaggcaggaatagaccaagcttcctataaagatacaaatacatcacctcaaagactgacccattaaacgattgtaacttctaacatcttagtctaatccagcttctcacattaacagcttactctcatcaagtccccaaaaagaatggaagccaggacagatgagcttgataaagatggcaatggttctcagccctggtgagacattagaatcatgcgccccagtcccaaagttctgaattaattgatcttgtgggggacccggtatatatttttaaagtctcctgggcagttctaatgtgtagttggagtagcaatcctctgatttagggcactgtgcacttccagggggagggagggagtatggaacaaaggagcccagagtaaaaggaggtcatgggaggctaggaaagcctcctcccacccaaagagtttgcccagtgtctgtcctgcttttgggtctttaggccacttctaaatcttttcacttctaattattccccagcaaatcccacctccttccccaggtcaaagcagactgctataaaggaaaaaggagtggagtggaccaatgtctctttgttaagaaagttccacaagctttgttttactgctttatttggagtctgattttttaataagacggggcaaaaatgggcattagtatttgtattagtccatttttatgctgctgataaagacatactcaagatggagcaatttacaaaagaaagaggtttaatggactcacagttccacatggatggggaggcctgccaatcattgtggaaggtgaaaggcacatctcacatggcagcagacaagagaagagaacttgtgcagggaaattcccctttataaaaccatcagatcttgtgagacttagtcactatcatgagcatagcatggaaaagactcacccccgttattcaattaccctccactgggtccctcccacaacacatgagaatcatgggagctacaattcaagataagatttgggtggggacacagccaacccatatcagtattccacacatccacagaggtacccctggtattcaaggaaaaacagcacaaagaaacagaccactcacattaggattatattgggtgctttttttcacccctaacagtgtttttgtaattgaaatcattaaatgggagcattaaaagggcccttcaaggccatctggttcagcccatgcaccccatgaggaatcagcagggctgcattcaggagcattcaggaatttacctttaccccaacctgagtttcaatcccagcttggctacttgctagctgagccaccttgggcatgtaacttatgttaagtttcctcagtttacttgtccataaaatgggactcatgatacctacctccacaataccacagagtggttgtgaagaaaaaatgagtcaatgacaaatattaatccacttcccttattagaattttgaatactgaatgtgatatttgatcctcccaccatcaccacacacaacagcattttagcaccatcaatttctgtcattagcatttgggatgttctgtggtgtcaacctcatttgatgaagttgactaatgggctacctaggtagaagcagaaaatatcttctcctagcagtttgccacagtgacaggaaattcatcatcattgctatgccttaactagaaagcagtactgtttaaaaaaaaacatggaagggggcccacactcggagtcaaaagaattaggctctgatcccagttccacaaatgtgtagctgtgtgatcttgggcaaacaacttaaactttctgagcctcggttttctcatatgacaaaacttgctctgcccacctagatatgataagggccaaatgaaattgtatatggcagcagttcccaatcagtagcaattctgcctccacccgacccgaggtacatttgacaatatctggagacacttttgattgtcacaactagtgagtagaaggaagggaagctgctaaacaaacatcctacgttgcagatgacagcctcccacaaagagttatcctgtccaaaatgtcaatagtcctgtggttgagaaagggctttgtaactttgagaggctcaggtgtcattcttaaacaacaagtacctatgaggaggttcacagtggctttcagagtcattgccaccttcgttcagctaatttctcagacccctttccaacaggacacagaactatgcggagggcacacccctctaagaagccttgctcagggcaaaagtgcagggcttagcaggctggcccctgtggagggcaggtctcccgccagccagggacacttagaagggttgtgagcatggggaggtttaacccagcatcttcatgtaggtttttcaaagatgcctcaaacccaacatgactcatatcaaattcatgttcatcccacattcactccttctccatggttctctgcatcagcaaatactaccacccttcatccatgagtttgctcaggccagaaatccaaatatctatggattccatccacttctctatatcacctattctctctttctctctctctctctctctctgtgtgtgtcacacacacacacacacaaacacacacacgctgcttaaaagccattcaaaagcttttccgataaagaccaaaatttttaacacagcctggcctctggcctgactctccaactttatttattaccattctcctcacccctgatgctagccaatcagttgtggcttattttagctctttgaaaccaccatgccacagggcctttgcacattcttaccttattcttagacactctcccattttcttgccctaattaactcctatgcttcctgcagatttcagcttccagcttcagcttccagtcattacattttcagggaactgttttctgacctccttgacaagccagttccctctgttatccctcttgtgaccaccacctctcctccataacccctaccctgctggtagtttacatttgtaaaagtcttggatcaaagtgtatctccctcactaaagaaaacattccaccagatttgctaactatcatattcaccacatagcacacagtgccttccacatagcaagaaatgtataaatatttgttgaatatgtgaatatggataccaaaggcaaatttgaggccaactataaaacaaacaaacaaaaggcagaaaaaacactcttaggttcattttaatttttgaaccccttttgtgccaagactagcttttggcctaatggaatatttttatgctaaaatgtctgaaatgctgtctgatgcctctgagcacacttaggcaaacatttctggtacaaagagagattatcaggcaatctgccttccctagcaccaaatactgttttccttgggcacgtcccagcagctgctgataaatctgcagacagtccttctcaatgatctttgtctcccagctttatcaaggcagcttctaggaacaatgctcctactcagctatcaggctggtcctacataggggtccattttggagactctccttaaagttatctgactgcactgcgctttcctcatctgtgaaatccataactagcaacaaggcaggaaccaggctctgcccaccaaggcccatgggggtggctctgcaggtgaggggatgattcttccatctcctgtgtggtggagcccccaaagggagcccaggccttctctctgcgttctactccaaagggcagttctcagatatagcaactgtgagtgatatatttttattttcccggaaaaatactgagcttctgttcaaatgagatttaagccaacatgaaagatggaatgtgctattttttttctttcctaaggtcctcgatgtcacatccagcaaaagcaggttgcccatattgtggtaattattgtctaagctcttattttgaacaaaaggaaattgtgtgtgtgtgtgtgtgtgtgtgtgtgtgtgtgtgtgtgtgtgtgtgtgacagagagagagagagagagagagagcaagagagcaagagagagagagattgacctggggaaggagaggcaaggagggagaaagaaaggaaatagaaagaagagagagacagcagagacagaaagaggaatgatgaagggaaagaaaagggagttcattccagggaattttttttattaaattccaacacgaggaagctctgtgtacatgggctccccgttttctccttctgaagcctgaaggcaaaccaggatgctgtgtcaattacagaaaaaaatcaatgaagatactgttcaggagtccttttcaccattcagtgcggatggtatccttcactttctagcactgattcattgactttcagcctctctgggggctgctgacatattgctatctctgaagaatctgaagcaaaatcacctttgtttcctactgcaacttgttcctccgtgcagttcgttagaggggccaccacatgacctccctcggctcgtaggactgaagggcaagaccttgctgggctcgccatgggctttggtgcctccctccatcaacctgccatctcccccgctgaggcacccagggcccagtcaggcctcctgactgtaggctgagagcctcataaattttcaaacactgtttcctctactgtgtctattctgactctaaaacaaattcctgctccagtactagtaccctcctagctcaatagcattgtagaagacatcttctaaagaaataaaacctattccaaagcaatggcattgatgaaggaagcccaggcattaagacacagaacatccctggagcaggcactggaagtgaggtatggagccatctgcacaactggatttccactacgacagtgccattcatttgagttaagtaatgcccttctcttttggccccattttagattttgaacatttctttttttttttttttttttttttttgagacggagtctcgctgtcgcccaggctggagtgcagtggcgcaatctcggctcactgcaggctccgcctcctggggttcacgccattctcctgcctcagcctcccgagtagctgggactacaggcgcccgccacctcgcccggctaattttttgtatttttagtagagacggggtttcaccgtgttagccaggatggtctcgatctcctgacctcgtgatccgcccgcctcggcctcccaaagtgctgggattacaggcgtgagccaccgcgcccggccgattttgaacatttctagagaggttaagacttcagtccttgtactagtttcttattgctgctgtcacaaattatcacagtcttacagcttaaaacaacaaaaacttattctctctcaagttctagagttcagaagtccaaaatgggtcagcaggactgcattctttctggaggttctaggaaaggattcatttccttgctttttctagcttctagaggccacctgcattccttgactcatggtcttctctctccattttgaaggccagcacatagcatcttccaacatagtgctctctctcttgctctctctctctctctgtcatcacatcaccttttctggctttgcttcctttgtcacatctccttctctacctttaccttcttatgaggatcatgtgattacatcaggcccacccagataatccaggataattttcccaactcaaaatccttcaataaatcatacctgtgaagtcccttctacctataaggtagtgtgttcacaagttctaggaattaagacatggacattcgggaaaggcattattctgtctgctacactccctgactttttagtataagcaaataaggccacccaatttcttcccagttggtgacagagatcagtggagagacacaggagtcaggtaagaggggaatggtgtgcactaaaaagggggcaaagagtacagagttgagaggtagaggtggtatagcattgatttcattgatttttttttcctgactttatgagtcatgtagaaggattgtcagctaaaatggtgctgtaaatttatggtgtgcattctctccaccccacctctattcaaacacaacgatgacagaaaaagtgaaatctaatttaaaaaatttaaaagacacaaaacatccccacggaccaggaacagaaaaaaacagaaacatggttaaagcaccaggcttgctgggccttgagttcgaaaggatgtactcgttactgagcaaccaatgagctgacagctgcctgacgtgaagccaataccatggcatcagcttttgagcaaagaaaagctttattgcaagtcaactggcagcggacaggaggaaatgctcaaatctgtctccctgagctgggagctgggactggtattacaagcatagcataatgagatgtgatctgattggatcttataatgagatgataccagggctccatatgattggatcctgaatcctgtcattcagtgtctccttcttaattcagttcttgcgcctccatcttagcacttaggttctgcccatggtttcatacatggttcatctgggcatgttccaattacatgagcttcaacgtggaggtctgtggcaactgcaaaacaattcacagctttgtcacataaaagtttaactagattggtctggtgtggctacatattcagtcaactaagagggtggttcctgtggagataaaggggcccaaagttccacgaggtgaggctgaccctgaaaccagagatgggttgggggttccctgcttgtgaaagggatacgaaaaagctttctagctaccccggccaggggctgatgctgagttgaagctgtgcacacctagggaggcagagagaagcaggcttcacaaccaagacctaggccaagccacccactggctcgatgaacacttttgagatattggcaatattatcgtgcgctgggattctcaagccaacaattatttagttctgatagggtgttccaaaggtccaaactgctagacagaacgatcattctggttattactgttgcatagcaaatcacccaacaattctgtagggtaaaacaagtcattttactttgctaatgtattctgtagcttaggaatgcagacagggcatagcaaggatgtctagagcctctgttggaggtgactcaatggctggagtcaccacctggaggcacatttgctcacatatctggaggttcatgctaattcaagacgttagctgagctgttggttgccctctacatgtgttctctccatgagggctattttggccttcctgatagcgtggtggctgtgttccaaaagtgagagtgagcatcccaagagagcaacgtggaagtgtacggcatttcttttcttttttctttttttttttttttttttttgaggcagagtctcgctctgtcgcccaggctggagtgcagtggcacaatctcggctcaccgcaacttctgcctcctgggtttcaggtgattctcctgcctcagcctcctgagtagcttgcattacaggcacctgtcaccacgcccagctaatttttgtgcttttagtagagacggggtttcaccatgttggtcaggctggtcttgaacccctgacctcaagtgatccatcagcctccgcctcccaaagtgctgggattataggcgtgagccaccgcgcccagccagtgcatggcatttctatggtcttgactcagaagtcacagtgtcacctcatcataatctattgattgaggcagtcacaaaggttggtttaggatcaatgcgagtggacatagaccccatcacttgtgaggaccattagtcagattccaacacaagcatgtaagatgggaagtattttttgcctaataacttgctgagaagttttgagatatcagaaatattattgtgggttggaatccccaagccaacactccaacacttagttctgattgagataccccaggaggcaagtagagatacctactaaagtattagatagagttagccatagaggatgggagggaaaacttccgcctcactcaaaatgagtctgcaaactaatagtccaaaatccgaaatgtaaataatctaagaaagctaaccagaaaaatcaacaactgagagatgaaatcacttcacaaaaaaattaaaataattgagcaataagaaaatgattttttattaaatacttctgtgataatatcctgaaacaatgaaagaaatagcatctttaaaagtaatgagattatcaaattagaaagcagaattaatcaaaataggtgattataaaaggtaactgtagaaatcttgaaaaataaaccacaatggatgagatagctctaaacttgatatggtgaaaaagataattagaaaatttaaatataggacaaaataatttgctcataatatacaacagagaaaaggatgaagacatttaaaaatggttaaggggacagtttcagttgtggtaatagtattgtagcttgtttcagactctctcacacataacaattataaactctgtaaaaaatattaaaacaaacacttgaagacactgaagaacaaccaaaagcaggcaaaatctgaaagagatatgtcccttgaaaggcggaagccatgttggatgacatatagccattttcagttgagagcagactccagtccatacagtgaagagtcaccagatctcaagcagaaagctgcagtcttattgacttcaggtgtcagaggatagagttccagggcagctggaaattagagaagcaaatcctggaaaggagggagccatggcatgaggtgccaaaaatctgcatacaaactccccttaaattattggctcacccctaaaatgcatattcacaataaggattctaaaaagacaagcaaaaatcaagttgaaatggtaaaataactaagcagagatatcggatgcccaccccaagagagtgagagctatcaagttgggaagtcttgctaaacaccttgagctttatacagacactccctcttactaaaggcaaaaccatgcctccacatgttcaaagtgatgagtcagtgatttaactccatgttagaattcttcagaggagggtcacagaattcagagtcaccacaacatatcatcgcagtgtccaacatgctatcaaaaatcattaagcatgtgaagacacaggaaatgtgactaatagtaaaaaaaaaaaaaaatgtcaatagaacagactctccctccaacccccagccccaatgattcaggaaatttgattaaacaaattttgatatttttctacagtaaaggtctactcagcaaaaggaaaaaaatggactactaatacatgcaacaacatggttgaatctcaaaaacactttaagtgaaatagaccaaacacaaagatatatgctgcatgattccatttatacaaagttttttttttaattttatcattattatactttaagttttagggtacatgtgcacaacgtgcaggtttgttacatatgtatacctgtgccatgttggtgtgctgcaccccatttatacaaagtttgagaacaggaaaaaacaactaccctgtgatgaaaaaaatcagaacagttttccatgagaaatgagaattgactaaaaggaagcataagaaaatgttattgaagatggaaatgttcttaattttgattgggattgtggtttcacaggtacgaattttacctcacagtacgaattttcacagtgtacgaattttacctcaatttcacagtgtacgaattttacctcaatttaaaaagtaaaagaatagttgggaaacagaggatagattgaaaaatttgaaaacatatgtaatcagaattctagaagaactgaagaactgatggcaagacaacattcaaagaggaaatggctaagaattgttgagagatgttgactcctcagactgaaagtgtacaccaagtgccaagcacaataaacaaagataaatcccacttagacatagcatcgtgaaactgcagaacattaaagataacatcataaaagctatgagaaacagggagaaagaaaagattttctacaaagacatgctcattaaactgacctcaatcttttcatcagcagcatggatgccagaatacaagtgaacaatatcttcaaagtgttgtaggaaaatgtaataaaagccatataccttgctaagtaccatataccttctagagtcagggcaaaataaagacttgttaaatataaaaaactaatagtttttttaaccactcacatgcttcctgaataaactactaaaggacattttccaacaaaaagaaaagccaaattagaggcaaggtgtggggctaaccagaaaactcagaaatagcagaacatattggcagccaccactagctagtaactacagtcagtcaaagacaattttagtattttaagaggtaattaatgtaaaagtaacataatgaatgttcattgtagaaaatttaaaaagtacagaaaattataaagtataaaaaccacccaaagtccagcactcagagatcacattgctgtttccactagccatgtacccataactgagaacctgtaccagtgtatgttcttttcaagaagatatttaatgatatgcattattacattagatgattcttccacaatggatataaacaatctgcctttcgatttgtccctgtatttactattttccataatgttgctataaaaatctttgtgcatacatttttgtatgcgttactttgctagatccctagcaaaggcagttctgtaaattctgtccattgtagaaagacctggccttattggagcagatggagcattcagttcctctcaaatgaaaggcatctggggagtataaacaaccctgtactgagaagccaagatgggattttgaatctatcctttcgctgaccaggccaatcaattgcttctctgggctccaggatcctcatatgtaacaacgaagttgggtagagcgtttggcaggtcccttcctgctgtaaccttctacaccacacaggcagatatcctgttcaaaccgccaataataaggcctgatcatgtccaaaagagcccccctttccccagaaaaaagtctggctctacaacaatggaaaacttctccctagtcccagctcccagggcaagtgacactatgaggcaagagctgcttgcagagagaggggaagctgaaaccgcacccctgggtgggatcagatttccccagtaaagactgacctcaacacccagaatgtgctcctggcccagggtgctgtgctggaggccaagtcggcttctctgacatgcttgccggggctagagttggcctgtctcctcggcctgtggcccttcaggctgaacagacccacagcaatgttctggtgcagcgcttcccacaagcagaagatagaagacaaatccctgaggtctgaaaatcatgcataaaaagacctacagcaaaagagaaaaatctgtttttcactttaaaatgcatgtgctttttctaccttattccataaagtttctgtatttatttgagtgtagaaaacgtttcccccactcttcaagtaaaattgatatcccccagaagatgaaccacattcactgtgtggcttaaaataaccccagcacacacaacatccccgaccagtggaaagcgcaagtagctgggttagagaagcaggactctcctctgccccgcaccctctgtgcttgctgtcagtagcctggctgtcctcaacctcagcactgtttccagtcctcagcctgggagctactcaatttgtctctcctgtttttttcagtggtcgcattttgaagatgctagatgtattattccgaaaaccagctgtccctaaatgagctatgcctccaagtaactccatagttggtgataggatgtttcctggtataggtgtattccacataagtgaaaaaaaatagattatcatcatcttgcaaccctctaatgaattaaaagatctgggtcatgatcatcaatggcagctcacaccaaaagggagacaacaagacaccctgggacttctgacgcagcaccgcctataaagtacgccaggctaacaacaaaaaacaagcctgaatctgaagaagtttcgcaatccaactaccagtgtgcaggaaatacagaggaatctgttaaatgacatcagtgcaatcagtgagatccacagcaaaacatccaatttcctcaatagtaaattgtaaaggggtgaaaaagagaaagagggaaatctatgaactaaaaagagatatcaagcacatgcaatctatgagtcttacatgttctgatacaaacaaactcactatttaaaaatcactggctgggtgcggtggctcacgcctacaatcccaacactttgggaggccgaggcaggcggatcacctgaagtcaggagttcgagaccaacctggccaacatggcaaaacctcatttgtactaaaaatacaaaaattagccgggcgtggtggcgggcatccctagttccagctactcaggaggttgaagcaagagaatcgcttgaacttgagaggcggagattgcaatgagctgagatcgtgccactgcactccagcctgggcgacagactctgtctccaagaaaaaaaaaatgatgcgttcagtgggtacagagtttcagtttgggataatgaaaaaaagctctggagatagatggtggtgatggttgcacaacaaggcaaatgtagtcaatggtattgatctatacacttaaaaatgggtaaaatggtatatttcatgttttgtataatttactacagtaaaaattgtttttcattttttaaacgatttatttttctaactacatgctagtatgtaaaaaaaagtttatgaaactactaggaaaatttgaacactgactagatatttgatgatagtaatgaattactagggctgtattttatgtgtctttatcttttagagatatatataaaggtatttatggattaaatgatatgatggctgtgatctgctgcagattaatccgatgctggtggagggggtggtataagttatataagagtggccaggaattggtgactgttgtagctgatgatggatacaggggtttattgtatatttgaaatgttccctagtacaaagtttttaaaagaagactctggccttgtatagtttacatttgtctgtgagaaaataaataaaatatttagaatatcagctagtgataagtgttaagaagaaaacataagtcaggaatataggaggaggtgcaggctggaaatataagtttggaaattttcagcatgtataaatgcttaaagtcctgagctttgaatgagccatggttacgttcatctagggaatgagtataaatagaaaatagactgaattctgaactctggggtcctcagacctctggctgagaggttggagaaatgaggacaattcaaaaaataattctgaaaagtcagtgagggagcaggaaagcccgtagtagcaggaagtccctaaatccagagacaaacccatttcaaagagggagtgatcacaaatgtccatttatgctcacagcctagtaaattcagtactgaagatgggccattagatttagcatctaaatatctgacctcatgctcctcccggcttctgatctccagctggagtcttgcatgattgaatccagtctagagccagagggcaaggaagcccacagaggcagtccagaatggagagggcctatgggagagcacccagaagacagctgtcacaggaatcttgcctccttcaatccccatccttttggagcacagagttcagaaatgtagggactgtgtttcattagagccagagtaaagctatcatcaccatcttcatcttcttcattctcatcgtcattcttgtttacccaaaaggaatcttaatcattcaaggtgccttgtttcactgtggcagagccaggataacatcccaagcctttggactcctggttcagtacattgcaccatcttccccaacatctccccagtcaccctgctcctgtgaccacatggatgatttacctttattcatcagttaacccattctcatggctggaagtttacaataaggacccctgcacagaaatcccccaagtctgcacactctgtagctgtttgttctttctttttttttctttttttttttttctttctttgtttttttttttttttttttttgacagagtctcactctgtcacccaggctggagtgcagtggggcaatctcggctcactgcaagctccctcccaggttcacaccattctcctgcctcagcctcctgagtagctgggactacaggcacccgccaccacgccccgctaattttgttttggtatttttagtagagatggagtttcaccatgttagccaggatggtctcaatctcctgatctcgtgatctgcctgccttggcctcccaaagtgctgggattacaggcatgagccaccagtccgggcccattctttattatttgtaccacatgtggcatcatcctaaagtcactggaaactgggagcacaagggccacactaggtcctgaagaaatcccgaggtgagtgggaactgtcattaccaataaagagctacctcatttaagtggtctctcctttcagcagagcacagtgtgctgctgccatggctgctgccagcaaaggctgccttccagatcggctcctttctggacatgtgcaaggaaatgtcctgggcaggcaaagtttccattggttttcagatgaaggggctgttttccaggggttgatcccaggaaacataaaagtggagaccacctggggcttcagtccaccctgtgatgttattcttgaagattaagataatttaggaagagtaataaaaaatatgagctaatatttgttgtgtgtttgttatgtcaggcactgttctaagcactttgtgtgtgtgttcaggctgaatcattggaacagcttttggagggacatgcatgtattaccctgacagtccagtcactccactgccccactcatctggatgactgtgtcactcctcctctctcccaaagctgcaggggtaccaccttcctcattcttgctgtcatctgatgactccactaagaaagtacaagaaaccagaacagaacttccccagctgcacgtcttctaccaccagagagtctgtgtcaacatgactcccctcctgctgccatggaagatggccagcccttgtgcatgcgcagtggaccctatccgctcttgcctactctagggcatcgcatcagtggttctcctctcccccatcatcatgttgttactctctgctagttcactccctacagcctaccaacatgctttaatttttcccatgttaaaaaaattccactcttgactccgtatactcctccagttaccaccttggttttcagtccccatttacagcaaaaatccttgaaagagttatttattcttgatctctccaattctcccccaaatctatcctactggggcttttgcctacacccttccatagaacccagtcctgccaagattaccagtgacttacctaaggggccttgtaccctgggatgctgtggggagcttctgtcctttgctaagattgagtgggggagggaactgcctagagctgcctcactctctcatcttcttcccctattccctccaccttcccttctctctccccaacagtctctacctcctactctccccactccctctccatttccctttccccttcttcttccctcctctccctacctgctctcatcccaccccatttccaccccatccataagaggtgggctgtgtggagcatgggtctcagagccagagacacaggcttgcaccctggttctgccactcagcagctgagagacatgggtgagttgcttggctctcagggttcagttcactcctcggtgagaggagaaactaatgcctcatggtgttctccagaggggtcgggagaccatgttggtgtcaggtcaaatgcaactcttagtgtgtcatttgctcgtagttttcctctctgtggcactgtctaaagcttccagaacaaatcaccacaaattggaggacttaaaaggcagaaatttattctctcacagctctggaagctaaaagtccaaaatcaagatgttggcagcattggttccttctggtgactctgagggagaatctgttctgtgcctctccactggcttctgatcgtggctcacagttcttggggttccttggcttgtgaccacatcactccaacctctgcctccatcatcacacggccttcttctctccgtgcctctgtgtccaaattcccctcttcctataaggacacagtcattggacgggagcccaccgtaatccagtatgacctcatcttaacttgactacatctgaccttatttccaaattaggccacattcgcaggtactgagggttagaacatcatatattttgggcagggacacaattcaacctacaacattgtcctgaaagtttgtgcccattgaactgcaggcaacacctgggaggtgctcacagattaagcagagtggagcgccataggggtagtcaaagaaaaggctgtgctgggaaggaggcctgagccttaagccctgcaggaaacacatgagtacaagtgacaacctgggcttcaggaggaagatggaagtgggttgaagcccagctccccgatttgctgcggtgagccttaaacttttcagggaatcacagatgctcccccctcagaaaagtactcacatacacacacacacacacacacacacacacacacacaactgagcttatgatttcaggggttcatggatctcaaacacctgaatctcagaagaactcctgacttccacactttgtgacagtagacaagttatttagtctctccgaccttcagtttctgcactgatgacatggggatgtggtcattacctgcaggctgttaggaagatgtgtgagaattcagtgtggtgacatctgcacgtggcgcagttctgatctccagggaccccagggaatggcagtcattgctcctggttctcttgccacccttctttcctccccactgcctgctgctcctgctccctgggcatggactctcatttccctctccctctccctctccctttcccagttgggctggagatcttcagcctattgggcttgaagaaggtagaagccggggcagagaagaagtgtagggtgatgaggcgatgccctacttctctcatccattaccattagaaatgcctttctgcaagacgtcccagctgacatggactgggaaccatatttttaaaaaataaacatcagaccttaaacaacatatcatgggcactgtgtcagaatgtctctggccaaattaaaccccagctcatctggtttaaacaatatggaatatttgattttccttcacatagctagaggttgtggtgaatggaagctgcaggatcagttagttccatggctcacgacatcctcaagggcccagctccttctgccttttcactgtatcatcctcggtgttagctttgtcctcagctgtctcccctcatggtcacaaaatgggtgccatcgttccagatctcccaacaaacacaatgttcaggggaagaagagggactgctcttccttgggtcttattttaaaactgaggtcatctttctcagaaatcctcccagacacctcccttcacatcttgtcggccagaaggggcctgtgctccactgagagactatgtggaaagaatatggaattaggatagtgggattagactcaccagaaattagtcttttttttttcttttttttttttgagacggagtctcgttctgttgcccaggctggagtgccatggtatgatctcagctcactgcaacctccacctcccaggttcaagccattctcctgcctcagcttcccaagtagctggtattacaggcacgcacaaccatgcccaggtaatttttgtatttttagtacagacagtgtttcaccatgttggccaggctggtcttcaactcctgacctcaagtgatccaccagcctcggcctcccaaagtgctgggattacaggtgtgagccaccgcacccagccccagaaattgatcttaaggagaagatgggtgttggagcatccactgacagtgcctgttacaggtaccaatcaggaggctcagtgtgttctgaggtaatagaagatgcagagcttgtggatgagtcaagcttcaatgcaatgatccaattgtgaaacacagtgcgcaaaagattgcttaatcctaaattgtaaattaaggggaaaatgtatcattaatgagagcagacaagagaaatgcctaattctaaattgagagtggagaatgagggcaggaaactggggatggttgcttagaggagacgccaataataaagtgaacacatcttcagcgtttagtatatgcccgacacaatgctaagtgcatcacatgcattaactcactgaaccccttcagtcgtcccgtcatagttactgcaagttcccatttggtggtgaggaaactgacgcacagagaggttaagtaacttttcctaggtcattaactttgttcactggtccctgaactaacttgattctggttgacttcagacccattctgttacttaatccctggccattcctcctccctaacctcataaaacaaaactttctaagaagacaaatatgagttccccagatggtgaagctagagaaaggaagttagtaagttcaggcagaaggggcagcaaatcagaaggagataagaaggatcaaatacaccttctagaaatgtattagcaggtttaggcaggaggcagttaggacctctgttagttggtccaaaaataaaggaagaggcaaattgaaaatatgtatatacattattttcaaaagaggaaatattagtattaacattaatataattaatgatggatgggtatttccagaactgagtttcatgtcatcagccttaagaaaaactgagtttctataaaggattcttgagatttggaaatgaatctagaaagccattcagtgtccaagcgagttggctcacaggccatacttgtagttcctccatatctgccagtcaatattctccattctctgcctccatgttccagagggaactaggagtcttcctcttggtcaccaaataggctattgatcaatgggtgggcggaccacagtcatgggtgcacagcccagcactgcttcccaccaagggccataggcagggcagaatcagctaaatagaccctaacacaaggcaggataacaaagaagggagaatcaaagctgacccaaagaactgggaagatgaggttcctggaagcagcaaagtggatggagaacatttaaaagaacaagtttgtaggaggaaggaaggtgttcagttttgaatagctggttttgagaagatgatggtacatccaagagatggcattagaggggcagaactagaatgcagggcaggactttatacacagagatgagattcagtcacattgatgtgaccattcattccattattgagagtgtatctggcactgtcctaggttctagagctgcagccatgattagaataaagcctctgcccttgtgcagcatgcaatcgaatatccaagcccttgaaaagaaatgatcctctgcacaactctccatactattttctgtatcctgtgtgaccatgcaaagaaaagggtgaggctgagttgggaaaacacaacgaagatggtgaacaaatgaaaactgaaacagggaaagcaccatcggagaacagagaatcgagaaagtgtcattttatggaagccaaaagaggaatgagtttaaagaagaaattagtgtcaaatggccccaggctagcagcaaagaaaaagtcatgaaatttgacatgagggttgccattggtaagcttctagcaatggtttttgatccttactgtgcatcagaatcacctgaggagctttgaaatacacagatgcctgggagctaatttcgagatccagactcaattggtctgaagtgagacttgggcaccagtattatgtttcagtgactctgatgatgctaagaggcaggtagagtcaagaaacactgctttaaagaaagggattccagcaaatgttcattggctccatttagcctttccacaatgtgtacatatttcaaaacatcaagttaaatgacgagttaatgggtgcagcacaccagcatggcacatgtatacatacataactaacctgcacattgtgcacatgtaccctaaaacttaaagtataataataataataataaaacatcaagttgtacaccataaatatatacaggtgtgatttgtcaatttaaataattaattaagggagctctgacaaggaaaataaggaagtgattcttgtagagtgatagcagtagaagctaaattgcagagattaaaaagaagggtgtgtttttttcatagagagactagcagtcttaacatcagacatggatgtttagcctcagtctcctgccttactgtgtgatttaacctctttgtgtcttatctgtgaaatcaggatagaaatacttgctgtgcccaactcacagtttccttgggaggtcaagatgggataatacatgtgagagtactttgaaaaaagattgaagtgctataaaaaatgtaagatttatatggttgtcagatttttttccccaaagatggtcctgaagatagtgattatcaactgtaaagacctacatggaaccagcatccctttccacactgagctcacaaagtcagcaccctttgataagtgctcacagctactatccaaaggtctaatgctgtttgcaactctcgctttttcacagctagctttgcactgggtctataatagatgcagtttccatagtcttgcaaattttgcctaaaattgctgaacaacacagccttctggcataacactacagttgaaggatgctgctgtaaaggttaaaaaggaagtttactgtgatatgatccccattagattgtcaaccctgtggttatagagaaaagggaaagcagaacagattgagagacatctgtgagagcaagcaatgctgcagtatctgaagagcctgatttctcaggcagatggggaaggattggcaaagatctgagccaaacccagcagtttttttcagtgaccaccttgaggtctatttgagtacttggatatgcccacctacataatatatgccatgctgggtctccaagtaacgaagcaatacttctctcaatcttctgcaaactctgactgcccttggggtaacacctggacccaggtgagaaatggaacttctttgcggtgactaaggtccaggagagaggctttcttcaatcatagatgatcttagatgtgaagagtaggattacaaagtgctttctactcactttcaggctgacattttccttaggggaagataccaaaaaaatacaattctttgtcaaggtaatagcatacttaatagttcagcttcttttttccaattagcagcttgaattcagagcaaaaagaaaatgaaggacaaactgctaactagtagtgaagccaggtgtcagataactggagaaagcatcagaggtatccccgggaagatcagttacctccatctctcctctaagcctgccctggctccttctactctggttgcaattaggatgaaggtgctaattacattctccaccagcagaaaggctcacttcaaaactgcccttctccaaaccgaagtacagacaccaaagccagccaccccctcatcttacaccacctccaacaggactcagagcttttttcatgtaaaaccacaggacaaaatgggattttgaaatgaagatataaggttgcttcacaagggtacaaggatcttcttatccagtgagaagtcactttccctgtgctcaaacatccttgtaaaaatccaggaggagaaaggggcacataagccaatggaaataccaagtccatggctcctttcttaatgacaaataactactttgaagaaggatccttcatgccccagggtacgggagcctaaatctctggcttgggaggaaatgaggaataatactgtagtcattcagtcctttactaaaatctcactgtttaaaaagctgctgttatcttggccaagttatttaacctccctgagtatctttctcctatattaatggaaaagaataaaaatattatcatacagcattattgtgagcatgatttgagatagaacatgcagggccataatgtcaaacatggtgtaactcaatctttttttttttttttttttttttttgctgctactgagactgagtttttcaatattagaaagtccggtgacctccttactatgtgaattccctgtgaacacaagacaagaaatctcagcctggagtatgtgcttataattggagcagggggcccagagcccagggaagggagtgcttagcagtttattcttcaacaattcctatcgtttcatctgtggaagcagtactcatcaataaatcagcaagtgacaggacatttttcaaaactgcatggaaatgttaccattttatactgttataatcatacacaaacaaaagagtatttttcccctgctctcaaagatacgttgttgacacagtttcagaagcacaaggcagaaaaactgccccaaaactcaagatgaaggctaaaattagatttttttcaaacacctcccctgacagtacctagtaatgttattgtggctgttgtaaccgtgggtgattgcctatacacacagttggtgcaatgaagagacacaatagcttaaaactaaactgtaagattatttttcaagtagcttctccaagtataatacctcagcttctagaaaaagtaatcactgctaacatttgaaaagtcaaaattctatgcaagggtctgggagattaacacgattgagcataatagctcctttcaaaccatttcctagggactaggctgcaaaaagccttaagcttgaagatggctttccaaatatattttatttattcaatgaagaaaaagactatttgaagtttccatattcctttcacatacagacacttcactgagctttaagagaagcattcgtctgtaggcgcaaaatgagtaattccccagcttctagaaaatgcaatcagtgcaaacatctgaaatgttaaaatgttgtgcaaaatgtcttttgtagagatatagaaaaaaaaaacctgaagtaaatatcattttaaactggtctcagcatttatgtttaaaaatgaatacatactcatatgcttagtatctgatgcatagatcatctccggacagcaacagcagctgcttcttgggagggtaactgaggccctgagagataacagtgggagggcgtttgttcacagtgcatccttccttggctttatattttgtactgtgtgcatgtattaatattaatctaacttaatctaaccacttaatttaattaaacatggcctcttcaataagcgagtcagctcatccatcccggtggagcagatctttctccaccatcagtactggatgctgaccttctccctggcctggacctcagggatgccgtacagcaaacttccctgacttcttttcacactgagcactaggtgggtgctgtgctggcactaaaaggatacaatgaacgtaagaggttgtctcagggccgtctgcacaggattgctagccctcccttcccaggctcctgccttactcagctttctccagggaccacaggaggcctctgcatatcttatgtaccactctggtcctttccttgttgcccccaacccctctacccttgccaacgtgcactcccttcctcaggaactctgagacacaatgaataagggagaaggtgaaagcccctcttcctctgggctctggagtaccagtgaaacacactggggccaaatcctcttctggaacacactaacaatatgaccttgataaagtcaacctcactgagcctgattctgaactcttgaaatggtggtggtcattatatcctcaggggaatggaatagagattgaatgagatcagttatgtaaaatgcccagtgttacactcaacacatagcatgtgagcagtaagtgttggatgatatcatcgtcatcattgtcagtagaagcaatggtagttctcactgccaaaacatgattgtttcaacctccgcaggcctgtacacatctccagctctctgtcctgggactcacttacacacagtgtggattagcggaaagggtgggctttccagccagaggggctttaccttgagcaagtccttaacttcttttaatgtcaatttctttaactataaagtgagaataattttataccttcctcataggagtggggcaaagattatagataatatctacaatgccctagcacctaagtgccctacatatcttggctgttttgactttactccaagggggctgatctatttactggctcctgtcaagacttgccctcttctgcctccacatctttgttcagttctgttgccctccctgccccgtcctctctttccacctccatctctggaaactttcatgcctctgtttcatctgagagattttatgacactttctctgaccacagtgaattttcccacaattgaattcgtagactgcttatcttctgtagggaaataggaggtgcaaatccagaagactccaagacccttcctctgagtcctctgttagacttattagaaatcaaggtgttaggcaacagccggcagaaaggactccggtcacatgcagccaaagagcagctcctcagtggactcactctgagctccccacacgatgatctctgtgttgcctgggaggggtcacttgccctcctgaaagtcaactccctgatgccttattcaggggtgtctcataaaataaaatggccaattggttcattgataaattaaggcacactggggcttctagcacgtggacagactgcagggccacgaggcgcgtcggctgacatccgcaggagcagctggtgtctcacctccccacgggcctggctccagctgctttgacatccattcagtgcaaatcacattgagtcactcctctctgtgaactttggatggttctgagcagcgctgcgagaggatcctgaccaagtcctcaccatgtcccacaggcccatcccgatctgactgtagtcttctaggcttttctcttgcagcagtcacctcctacctcttgctcttccccaagcccaccataatctttcctgcttctagtctttcctttacttggaatggcctttctaaacttctgtacctaatgaatcctactcatgctttaaaatccagctcaaatgttgtcccctatgaagaactttgctaacctcccagacaaagcgtgttgcccagttttctcagcagtcctctagtgtggagctttttgcgtagtacctctgttacatttacatccttctccccaacaagaccataagcatcgtggggtcaaggatgattttataacccctgagtctgccaagcatggtgtctgataaccaacacatttcattgcatgaataattaaagaaaacagaaataaatgaatgaataaacaatgctctttttgttttgttttgtttgagacagcctcattctatcacccaggctggagtgcagtggcgcagtctcggctcactgcaacctctgcctcctgggttcaagtgattctccttctttagcctcctgagtagctgggattacaggggcccaccactgcactaggctaatttttgtatttttagtagagacagggtttcatcacattggccaggctggtctcaaactcctgacctcaagtgatctgcccgcctctgcctcccaaaggaacaatgttgtttctaacaaaatacaccacctttcctggccttcccacctaaatgggttcctggaaattgttcttggccagtatgggttggtgaggggctagccagggagcagagtcatgttcgcaaaaggtgggcactcatgagagtggaagaagggaagtaagttcctatgtctagaataacactctcctagaaaacattacatctgggggatttttcatttctgtgcttcttattttcactcgcctatactcttgcacaggattgatttccaatgaaatttgataagtgatattttgttaaaatgtcctgattttttttaattattaaatagctataatcccaggcctgaaaaatcccttatccagtagctacagttgttttttgaagcaccgccaccaaaattattcccctggtaattattgagcaatccgttttcacccataagcctgtcacatgtaataaggatgcctgcctgcctgtttattttctggctaatttggtccctttacatcatgtgaccttcagtggcctgtatgcaatatgaaaatcgtcctcctaggactttctttagaaggttcacagaggtgtgctaagcataagtaatacatcagtttttaaatccaggcagagcaaacccatatcagatgtctcaggaaagcctgcaatgctgttttataaagggaacagacgagtttcttgatctttgctattctctgcaagaaaatatctcacctaagtacatcctttcgtatgcactctgtagcaggacatttacagggtcagagaaaaagacactaaaaacttacccaagctgttagctcatatttattaactgcttaatataggccagggtgcaaaggcctttatatgctttgtttaatcttcccccaaaccctgggagatttttatcccagttctgcagattagcagactgaaacacagagaagttgtaacttacccaaggtcacctggctgtggatgccagagtaagcatttattttaattgatacataataatcatacatatataggtacatagtgatattttgatacatacaatacatagtgatcccatcagggtaattagcatatttgtcatttcaaacttgtatcatttctttgttttggggcattcagtatcttctcttctaggtatatgaaaatatacaatacattattgtaactatagtcatcctatagtgctatagaacactagaacttattccttctatccagctgtaattttgtatcctttaataaatattttatcctctctcccccgtacacttcccagcctctagtattctctgttctactttttacttctttgagatcagcttttttagcttctgtgtatgagtgagaacatgcggtgtttaactttctgttcctggcttatttcacttaacataatgtcctccaggctcattcctgttgctgagaatgacagaatttcattcttacttatggatgaatgggattcctttatgtatatataccacattttctttatccattcatctgttgttgaatacttgggttgatccatatcttggctattgtgaacaatgtggcaataaacatggtggtagatatctctttgacatactgatttccgttcctttgcataaacgcccagtcatgggaatactggatcttataatagttcagtttgtagtttttttcaggtacctctgtactgttctccatagtggctgtactagaatgcattcccaccaacagtgtatacgagttcccttttctctgcatccttgccagcatttgttattttttgtgtttttgataatacccagagtatgcttttgaagtcaggtctttctggctccacagtctgaaggtgtaacactaccccaggctgcctctccatagcatgtttcctgatttctggttcaagaagactttttctaacaggtgtcattcctagatggctctcttaagatcttactccctttggcattttacaccttactcatacaatcatttttaaaaaatagcaatttaaaaaaatacagttcaagtgttcatcatatccaggcatgcaagccttttctaaatttttttaaataataaaaaagccccacagaggaaaggaggttatttgtgtcctcctgacacacacttttagattttggttaaaaagtctctagtgggtgcaaagtgaccccctttgtcactggaaacaaataggagcattctttgtgccactgtccacaaccacacagatatgtttcccaagggagctcatcaggtcttcaaacatttagcaagcatgacatgtgtaagagacagtattggagaagtaagacaagccttgctctgccgaagcttacaatccaggagctcaccccttcaaggaatttacagcctccagacagataataacattaggtccatgaaagcctacaaggcaagaagttcaggagagaaagaagtcataaccatcttggaagaatctcaacttgttttatcagaactcaaacgccaatttctcacccctagcttccctcattagcgcttattaactagtattgggaggaccaagcgaagagtaaagctagggtagcagaggccataagctaattgcaaaggacagagctaaagaaacatgctagtttcccctgagcacccaactgcatgactgaaaatggattaatttgtatttctaatggatatacaagaaacacgtgaatatgctaaaataaatttaaggtcaagcaatgcaaagtgttagtgcgtttgccttccactctcagaggcagcctctcttatttggttcttgggctgcttcataaaaagttctgtgttttttaatggcctcagcttttgggaggctcaggccacctagcccatcaggagaccaggcccgaaggatggatctgaagagtgggcaacggagagttaaaccagggctgacttcaacaggcccagtcaagtcaggggcaagcacattgtccatccactggaagacggaaaggggagaggaaggcaggccctcccgactcacaggtcacctcgcaactttgctaggcactacccaccctttagggataagtgaagtatgtggtgggcatacaaggcgcacaggggagtcattctggcaaattccaagaaggttttaagggctcccgaggcaggcaggcccagttgctgtttggagcttcctttggggtgggaggatggcgggggcagggggccggggcggtgccttaacgaggggagatgcttttaaatagctgccttccaaaaaccatcctccctgcttctttgagaagcacccagctgttgtttaccctccaggacagcaaatccggttatttgtctctctattccgtgatattataaagtaatgaatggtccattaaactaagtttgggatcccgtctccccacagccacctcctcgccggcaccctcagccggggaggccgtaggctcggctgcagcctggcagcctcagtccccctccctccaccatttccccctactccctccctctcctgcaccccctccccccggttatttgggagattagagttcattaattaaatcctgtgcttagatcgaactgtaacattattccaatcacatttatcttgcaggcggcggaggagatggcagcctcgctggaaacgcgcgggggagcctgagccggcggccggggacgcacggcgctgcgcgctccttcgccacgccgccgcgcagcccctccatcttcctgctcggcaccgggccccgcgcgcccctgcctacggggtcccgctgctctccggggctcctgccagccccaacccccggccccggtggcctccccccacccccgcccgggtccccctcctccgccacacgcgcgcgcgctcacacacacacacacacacacacacacatatatacacgccagcgagctgctggccgctcaatggaccgatttccccggtttccctgaacccagcccagcccgggatgagaaactgcaaaatggcccgggtcgccagtgtgctggggctggtcatgctcagcgtcgccctgctgattttatcgctcatcagctacgtgtccctgaaaaaggagaacatcttcaccactcccaagtacgccagcccgggggcgccccgaatgtacatgttccacgcgggattccggtgagtgcgggcctctgtgttagtgccctcgggaatttggttgatggggtgtttggggaagggaaggcgtgggggaggggtgttttggcctctccgagactctttgggccagataactgcgcggtccttccactcctctctctaattctcccttccccctccctgttattttttttttaacccaaagcccctagaagccgctgtccaaatcgatgtgattgcatttctcgtattcttcctcagcatcccttccctcatttcagaaatgggggttgggggaggctttcaggagggtgagggtggagggaaagacggtgtgtttgttcgggagggggcggcgagcagagatggacaggcgtgaggggagcgccctccccgcgccctgtccgcagactccgcgggccgggcccggggcggtgcgggcggtttaatggcgcaggcgccggactcccctcgcgccctcctccttttctcccccacgcctatcaaaggacacgcgggtttattctcaggaagcccctggggcgttctctctcgaccctttcccccgcagccaccgccccccaccagctttccgggatttctgcaattcccccgccccctgcgggaagcgagcctcggaagggccgcccaccctcgccaggtcggagtcaccgctccgcgctgggccggcctgtgaaggctccaggcgcagcttgacgccgctctgcgagagcccccgccccgctctgtgaccccgggaactctcccagcagggcctcctgacgggcaggtggcaactacaaagtgccacctgtggtccaagctgggaccgaggcgaggaacccagaggagcctcgcctggaccgaggagcggagtaggccggcggcccccgggggtccccagccaagttataggaagtgaaatcggacgtgggtttgggaaggaagaggttaaggcaggaaccacccccagactttccctgggtctccggtttcctctgccctttctccaaaaacaattctatggggctgcaaaggcgtagcgggtcaggctggcggggcggccgctgtccgcggtgctgattccctggtcctcgcagcgccgcgggctccagccctgcgcccggcgtgcgccctgctctccgcatgacggccattttatggtctctccggcacccggagggatggacaatgcagatggggttccctagttttctttttttctctcgggtgtgtgtgggagcagagggtggaccaaatgagaggggctccgggacggaacggagcccgcacgcgtaccagccgccctcgccccagccgctgcactttaatggctacctcggcttccccgagctgaggccagcacgcttgtctgtgctcatgctcctctccaggtcacaatttgcgctgaagtttctagacccgtcattcgtgcccattacgaattctctcacccaggaactccaagagaaaccttctaagtggacatttaatcggacagcgtttttacatcaaaggtaggataggaggaaaagatccaaaaggtgcttttaagaattcaagagctcaaaacaaaacaaaacaaaaacaagcaaacaaaaacatctaaaacaacaaacatctatacgccccaccctcaccatcaggtgtatctgcattgttttcttggcatgactgcacaaagcaatgatcaggaaccttctcctgtgtgtgtagtgtcctctcataaaaaggacatatcaggaccaatttgaatagcaaaaaaaaaaaaagcattccacttgggcttgattgagcaccatgatttacagctaacaagtctggcaagtactgccaaagccatctatttaaaaaaaaaaaaacagacaaaaggttagttgcaaaaagaccacccaatgcattttcatttcctcactgaaaaaaacttgaaaaatagaataaagtggtattgtttctttgaaacacacggaaaatgccataatctgtctccatcaaattactcgtgaaaatgctggcccaaatgtatgtagatatttaactatggttttgttttggttttgcctgttttcattgtctttacagcttttaacttactgtaaaggtacctaacttaattcctactaattgtagcggtttcattttatacacataagatggttttgaggttttgtttttttaggtggaagaaggatgagatttgttcaaatgtatttattctgctcagtgattctggtctactcttagcaaaccacgataactcattactccttccttcatggtgggattattttactgctaaatgggatgtgagccatctagcgtattcattagaagtgtgaatacttattttacaaaccactctatttagggagttgtgttttgatcttagcatttctagttattgctctctctctcttttaaaagtttaatctatgggcagaattaaaacaaattcagtgggtattcatggtctcatgaaaatactgttcagatgaaaagtcagcatacagtcatatgattaacattttaaaaacacttatgtttaattataaattagttcatgaaaattgatcaattctaaaactctagaagtgtttttttaataattgggttttaattcaatattaattttatggacaacccagaacgttttcatgggtagaacacattctagctttccccaaaacatgtttctaactcaataaaaaatattcttcccacactaggccatgtgacccaaatgaccagtcagaagaatatttccttctcaaaacttcgctcattttaattaattagataatctttcattaaatttttaccagtagcattttaaatctgccttacctttttaacaacttgtaagagtggtactggtaacttggggagtttcaaagatttcagttgctgttgcctctattttgaagaatgaagtcatttttaaattaaaattccaagcaacggatgatgtgcaaagcatttcatttcattcctgctacatttaggcaaaagttataagaaattcactgggtttacttaacatcggagaatctagcagcagtagcatgttaccagtctctcttgaatgttttaaatagctaaactttaagaagagatacttaattttacttaaagctcaatatgaaagcaacctgaaattagttctaagtatcagtcttgccttgtttatgtactgaattgctagaatatggaaatattttcaggatttataatagccatgttttctaaggattagatttattcaactaaattgtgtttctatataatcaagtagaaaaaactccctgtttcattattcaaaggaccttaatgagattatcatctcatttctattaaatattcagctacacccactgctattaccatcttcatattttaataatagatagtgctgtactgactcatatctatttggctcttatttggacaccactgatatttgatattctttgagcacttcagtccagtagcaaacaagtagaccctagttacaaactatgtgttactaatgtttgtgcattaatgtgagctctttcaggcctgtgtaaattgtctccctgtattttctgacacaatttgccctatacctccctgctgatcaaataagatacactcttcacgtagagcagaaaaccaaggtatggcagctaaaactgtaagttgcatttacaagcctcaaagaatacacccagaaattgactgaaagattagaatatgcggagattctgaagcagtcctcccttcaaggaccacaattatgtatgtataatcttttttggattcaatgagcctaagattccctctgaatgaaatgtcagcataagtcataagatggaaaatcaattcttctgaatggaatgcttttcatgaatttctttttattttaggcaagaaattcttcagcatgtcgatgtaataaaaaatttttctttgaccaagaatagtgttcggattggacaactgatgcactatgattattccagccataaatatgttttctctattagcaataacttccggtcacttcttccagatgtgtcacccattatgaacaagcattataatatttgtgccgtggttggaaatagtgggatcctgacagggagccagtgtggacaagaaatagataaatcagattttgttttccgttgcaatttcgcccctacggaggctttccaaagagatgttggaagaaaaaccaatcttaccaccttcaaccccagcatcctggaaaaatattacaacaatctcttgactattcaggaccgtaacaactttttcctcagtttaaaaaagcttgacggggccattctttggatccctgcatttttcttccacacttcagcaactgtgaccaggacattagttgacttttttgttgaacacagaggtcagttaaaagtccaactggcttggccgggaaatataatgcaacatgtcaacaggtgtgtatattttattacattttactcatactccaccagatggcaaatcaatgttgtaatctcttgggggtgggagccatccaattcattagttgttgtggtgagtttagtagtaattagaagaaactcatatgttttgtaatgagcgaatgaatgaatcattctagctaagaagttccatctacccacagctggtaaccaagtgtcagatggaaggattggggcttcatcagtctcccgtctctattctctgtcctctcccttggtagtaaggctatggagcagtcatggaaatcaccacaaatcaagaattttctttaaatagatagctatattccaagaatgccaatggctaaattagagacaaatcaagtggtttttctttttagaaacgatgcagttgacttaaatttatgttttgtagatgtccaaggttagcaaaacacctaaatcataaattgcacaatctgcctttataatctgatatttgagtgcaaaaacatgaagaaagtattttatgagcatgttgttatctcttgggatttgatagacagattagccagagatgcaatattttcttctagtctggtgattttcaactctggttgtatattagaatcacttgagagctttaaaaatactattgtctaggctctgcctcaagagatcctaatgtaaattatctggtgggcagggaggtggaggccaggtacttggtattttttaacaactctcctgatgattccaatatgcagtcagaattgagaaccactagcccagggcattttataaaacaagattaattgtagattttttttcttttaaatcatctggagaaaattatctcaacttcagtttcccctgtgtaagtagcctcagtgtcctaacatagccctaaatattattataagttggggtgggttctggagacctggtaaacagggaattctgaagatctttattccacaatagatttttcccatcctgtagcctcttaagatgtaagatctgtttagttgacctctcataggaggaggaattacagcctaataaactggtttgtatctcaatggtagagtgatgccataatttacagtccaaactggaacattttctttgagagaaagagggtgctattaataattacaacacagataactgacaaactgggactgtcccagttccccaggatatatggtcacctttttaagtggtgatgtagcccagctcctaagtttaaagatgaatcaactgaggtacaaggagcagaagttatttacccaaagtcactgccctaaatgagcaagactagagttagaagtcaggtctcctgccaacctgtcccatggtcttttgatctcctcattttgctccccttttgttcaatttaagtttgtctataccgaaagggttgtcagagtcattctagttccttagacaggaatagtaaaaccaagactgaacttttaaatttcatttggaaggggaaaggttcacctttgaaatcttcaagtagtgaagaagaaactgcatgtgcttagaaacttccagaaactatcctgtgtggctgcctgccacaaaagtggagttaatcataatgtttcttagccactcgggcctcaaaaaaatacatgggttcaatgaaaacgggaaggaaatacagtccacagaaacctgactaatgcacagtttcattctgcctgcatctccaatgataaatacacacaccacatagaagcctcaaatatttggcggtgtcagcaggaaggcttcagagtattaatattatttaaatatggaaggactaataactataatttattatttacacttaatgtatcttacacactttctgaatttaaaaaatttagcatgccagattgtggcatgctgaagatgggcttgggaacccctagttagaagagaaagaagcaaggaatacaattatttgcaagagagaagaaaaataaggctccacaatctttctaaaccccgaatgaagggtttatttctaggtttgagaaaggaagagacggaggagtttcccttagattaaatgacctccttcaccctatccaagaacactttatgtaagaaaagcagtcattctttttggtggccttctgttgtgtcaccgctgggtcagagccacaccactctttagaaaaacccaggggcagcttcaaaggccagcttcaaaggtgtgcaaacagtgtgatcccaggaaatcccatgctcagaagggcccaacacttggtttaatactttgctcttgcactcgaaattttcaatactttttgaaccaagactccacatttttatttcttactggatctcacaaattatgtaaacagttgtgcccagaagttgtttttggttgcctaaaatataatttcaaaacaagcactatttaagttacagtaacaaatccactacccagcccagtcagatagaccttgctgattgaaactttcaacgctgacctctgaatccaaatgtacttattgttccacaggtactggaaaaacaaacatttgtcacctaaacggctgagcacaggtattcttatgtacacccttgcatcagcaatatgtgaagagatccacttgtatggattttggccttttggatttgaccccaacacaagggaagatcttccataccattactatgacaaaaaaggaaccaaatttaccaccaagtggcaggagtcccaccagctgcctgctgagtttcagctgctgtaccgaatgcatggggaagggctcaccaagctgactctgtcacactgtgcctaagaactccaaacggaaagtgccaaatggctgtttaaaaagtgccccaaatcaaattgaatagccttcagaatagaaccctagagaatgtcttataaggattgtctgccatttaaaaggaaagatgtcttttctcttttgcactgctcttttaagagttttagcagatttagcaggacagatgcattgaagccacatggtttagacttgattgataaagggaatgttgcatttgggactatgctgctaacgaaatggtttgaagtattttcatgtttggattttaataataaactgcctctcatttttatgaggactagagctatagtttctgcagctctgctcagatagtcctcataatcagaggcctctggccaactggggcaggacctgttttgctggtgggatcagactctgaaaaatggaaacgtaaaaaactggtttgcatatctcatcttctatctatctccctatctccatctctatcaccatctcactccctccctctgcaactactccctgccctaccaccgtggagtttaataatttgctaggaatcctattgaattcgctttgcttgtatatgttgcatttgtacttgatgtgtttaaggttctgggtaactttgatgcttcatgacaaaataggcaaatcacgatggactcccttgtgattccttttttaaagaaatgcctctgatgcagtcctcaccagtccattcagtcattctacagcaagatggtccctctgtggtgagtgggatataaggcagtgcatctttcatgatcacaaagaaagcctatgttgtggatagcattgcgtctcttgatgtaggcattgttatggcaaataatagcactgtggccacatctgtaaggccattccagcctaaatttagtgtctcccataatcccaacccatgcactaggctgggtgttctctcagaatatagaggcaatgaatcagcttaagacgctgggacacacaaaggaaaaggaagaagaatatttagaagttgttatggaatcctgtgtaccctaaagtgtggtaaccatgttacccattccagctgggttaaagtggaggaggatcttggccaggccaggtgcccaggtgactagtgctgaggtgcgatcgttttccgtgtcattgtgtgcaccaccaccaatccagaaccatttgctctctttgagaacattgtagcactggatattccctctttccactgaagtcagatctatacaactacaaattaagcatttcaaaagaaaaagccattgtgcagtggcaagagttggaatccaagattatgtagacctgcgatgaaggaagtagctggccattctcattttctttatttcagccatatgagtagaaatcaaatcattcccatccctggctttttactgagcagcactttgttcttccaattcagcccaacgtctggccaagttgatgttaaattttaataagagtttcttctttccaaatgccagtcaagcatatttgttatgcatttgagtggggtagctcattcttttcctgaaatctcatctagattgcttgcaatgcgacaaataactgtttaaaaaatgtgctgtagttcagtgatgagctcattgcccctctttaggaaggtaagatcatgcctaaaattaaaccgaatatggtaaggaaagacactatcgttatgctcacgttctgcctggtcctaaacctgccttattattattttcagaaagcaatctaattagagcaacttgcatagatctagatattaactaatgaaagaaacaccaagttcaaatgtgttaccaattatgacacacattacaatataattataaggggagacattaaaaacattttgtaattcagtggtataatttgatgggtatcacaaccacaccgtgtttgttccctgtccctttgaagaggactgtactaccatcctcacactgtgctctgttgggatcactgagagattgacaactgacagaagtgtttagttggctgttcctgagcacttagttcatttggttatagctaagtgatattaatgccaatattacttgggccagattctgactctggagttttaatcccaatgtgcccattcattttcactaaatataaatgcatagacactttaaaccaagaagattaaaagaggaaaagaccagaatctctaaaaaacagtttactgttctgtagtggacaatttaaattttatctcatcataatgccaaggatttttgtttgttttttaagttcagggagattttttaaatctccttgcagtcttggctccatcttaaccttagagtgggaggactttcccatcccccaccaccgtgttatctatcactttaatgaaaactcaaaatagtgaggaaatggacttttcttcagaacttgaggggtttagagatcaggctcatctctgcttataaggaggacttcctggagatgatcccaatagatcacccttcacttttgaagaatagcagcttctagctgaccatgcaaaatctctgtttgtttttaaagactgtttcaaagattaaatctatacaaccacttttatgaccaaaaaagttgttgtgtcccaagtgtcctaattagaaaggcagctggctctcctgcagctcccaggcttgtgtagtcaagtgcagtgaactgggcagtaatcagctcaggaccattggctctttcctcctctttcagctacagacacatgccctggcttttgcattgaccttgctttgttagttctagactaatttatccttttgtcagacactttcccttttttaggatactcacaacagagtccactttcagctattggaatacattttaccataaagcccccaaggctttctacccataacaccaacacaaaaaaccaattaagttgcagaggggggaaataatcacaaacttttggcaacctgcttaatgctagaccctctgttttcactggttattctgagtgtcatatgcagatgcagatccaagggagacagggctaaatggtggtgtcaagaattcctcccacaccccaaaaattctttccaatatttgattattaaaatatctatcatttctccaccttgtgtctgtgtcttaagtgtctgtgaatattgtaaaagtgctgtatgtttagtagtgttgtgtgcctggcagtgctgactatgactactgtgccatctgtctgtgaccttgatgtcaggtacctggccatggggctaccagcaaggatgtgcaaaggaagaaccgctgcccctgccctcagcttccttatgcccgagccactacttatccgtgaatgtgagtgccaagagaaacctaatttggtggggaagccaaggaatgggagaacgttttttctgatttgagtcaaggcactaattattagacactctcagacaacaaagcggtattgacctgagatcaaaggaagcagggacaatattgtagaatgctaggacactggaaatgaagaggccttcagcttcgccagtcttgattcttgactttacaaatgagaaaatggagaaacagggaggctaggtgatttgccccagatgacactgtcaattagtggagaaattatgattcctcctctagtacttcttggtcttaccagcatcaaatgaagctgggctcacagggaaagtggtttttggtctgggatctgcagagcacataaaataagttagaaagtctataaaagaggaaaaaaggttctcctctccctcccaaaaatgacttcccaacacagaacaataaaggagatgcttgtgtggatatgcaactgtccaccaattatcacctaccttctccctgagatgaaacaaaacacgcttggtaaatcatgatttgataaataacaattaagttactggtggttcatgcttgacagctgcaatcttacccaataagctattcatcttagtaaaaccttgttttagtaatatacatgcataatttagaagttgaaggctgaaaattgttgtgttcttctccatatatatacaactttcatcggggtcccttgagttaagaaatgccttctattttataggtaatctcaacagcagactttgaaatattgtgtttggttcaatatgctaagaagatatacaaataataataacttcgtgagtcttcatgtgcaaaatgacaaactgagcaattttctgtataattctagattcttaaaaccttttttcccataattgtttgaatgcactaggcacaagtttctgtttaagcctctgcttctccctgaatgtgtagaactgtcactttgcttacaaaggggctgtgtgtttgtggctggcagcccagatagagcactctgggtgctggggattgagggcaccttggccagctgattgacctgtctggactctgtggcccaattaatcgaggccacagatcagttggtactaagcatcaaaatgattcattatgcctctctcacactccgattgctttgccacatagataacagcatttgaaatgggaaacactttagaatgtcattattgtattatatattgtcatcttatgcagtatttctgaaatttatttttattgtgatgactgattgaagacatatgtgtatgaatagatgttcctcagtgaagcctattctcttgttgttgatgacagtggcatcagagtgaagagttgttgcagagtaactgacttcagtttaaggttaccctggggttctggggttaggacccggattatgcagctgatctcccagcaaacacagctgtatgaaataagcaactcttcaaaatacaattcttgccactcattctggacctttgattcataatgtcctgggataagtccaacttacaaagattcccaggtgattcgtgtgaccaccatttggaaaccagtaatatatacatccggagtcatatataccattttgaacaaagtagctaaatgcttatctctccttgtgcgattagtttcacatgttcgttgaggttatcatgttaaatggcaatatagacacagtcttagtgattcaacaattcagctgtttcagccgaattgaccagttgctaatttataagcaaatagtaactgatcaatttagtcagaatggatgcaagcccaaagacaaggtggagagcaagctttaatatacactttgtctcaaggccagctcttcatatttccctctttatatttcaaactaagaggcagatctcaggtcactcatctttagaattggtgagaatgagaaacagggaactgaagtgattcattcagattcaatttggaagtcattcccagagcctaaaatatttatctaaggggtctgatttatcaacctcaggtagtctccaaaacacaaaggtattcaggctaaaataaaaccaatcaaaaaaggaaattcaggaggctccagttctaagactaacccagtataacaagggtgatcagttattacttgtggccttgtaccacctctgttggataatgtgccaccgtcctaatgaagctttggccagacttctttctatagctgtgcacatagaaaggctttagacaacagtgataccaaagggttcctttgattttccttctgtgtgattctcagacagttttagctctttggtgtgctgccaaatgtttaacaactggctctggaaaacagtggaacccagatttttagcacctaccaatttctatggtgtaaatactctcatctcagccaatttcaggctactaacttaatgtcaaccagctgaaaacacaacaatatgttttcaagagccagtataagttggctccaatacagcatgagccagctccagcatagcactgcctgaacaatttttaagtcagtgagtaccaaataggagaggctagcagaggctttggagggacttttaaatgtcccctccaccaagggaagcatttccatgttggttagttttactgatttttagtaaaagagcatattattggatcccaaggtgttcaaatattccacgtgactcttaggaacctctcaacagactccccagtatcttgggagattaccaactgtggcttttctaatttctaagggtgaccctccaggaaaacattctttaatttaactaccagttaaaaccatgtttggctgatcttttttaaaaaatctatacctatagttcatcacttgtttccccaactttgtcattttccctatccacttgcccctcatccttctgacacaataaaaaaaatacaggtacccacaaaacagtgcctgcaaaggagcaggggaagaacaaggcacccagtaagctcacttggctctacatatctggaaaggcactgaggttccaaggtctctaccccaccaggggacacccagtaaacatcacgctgagagtttaagttgcactcaactggagttgatttgcccttagaaaagtttccaacggtgaagaaataccacttggtaggaatatctctgggcaacttcattgctgactgggcaaactttgtaggataaggtgtcatgtgatgtaaggctggaccatgaaaaacaaaaatctactaatacacatttggcccctgcagtcccctggcattgagcaatagagcaactgtcctttctcaccactagttgtgagtgtacttccaactgagtgtttagaaatcaggtaatctggtaatccacagaacaagctttgtttgcaaattgcaaatttttctggtagaagtcattcttaggtgggcttcattaaatctttggagaggcaatgctgggaaaaaatatgcctaattcctaggacacagtgagtggccgtaagttgttatctgcatgtactaaatcaaaattagatcatgaaggaccaaatctacttccgttgctataataaaataccctacaggttctgtaaggcatttctaaactgtaaatgcttgaaacgcaagttggacattttctatactatgtgtaaaatgccaggttatacctctattttctttcttcctaatggtcattgaaatgagcttgtttctctacattgagcaagctacattttattttaaatgagtcaggtgcatgttcagatgtctgtattcccaatacattgcatgcagcctgagcacaagtatgccttcaccctctggctcttttcctgacaccaaacagagaagtccacagctacaagcacaaggggcttgacaggtaggccttgttttattatgaacaaattcaccagaaaaccattcttgaggaaccagccactcccatagcatttttagtcttagggaagaaaattggcagggaagaaaaattgacagacaatgggaaagaggtttggtcaacctgcataagtggaataaagtcattgaagtacttgcaaaaagaagagggaggtttccctctgaaggaatctagaccattttttaatatggagaataactgtaccccatgttagaagtgctctttagccatatttcaagatccagatctgaacccatactgtgcagaaaagcacaagagcgcttacagccaagagccctgggaggagttgagtaacaggctgagatccggtcaccaagcatcattagttagcactgaaattctcccaggacacaaaacaaatgtatggaaacatcgcaatacactatcatttactcacatgggacaaccacctaagtccatagcaaaactttacagatctagatgttatctcaagtcaggattccagatcaacatcctccatgtggagatgagacaactgaggttcagaaagttggagtgacttatttgcccagctagctaactggaattagagtctgggtctcccaaccactgattctgctacaccacactgtgctgcttccattagttagatggacattgacaattaattgtgaaagcattaattagaagtcaagacaaaagaatgtttgtgatatcttctctcgcttaacatactttgatttcaccattgcatttcagcattttaaagaatagtgtatcagtatagaaggaggagcaaagctctttaagagtaatgatgaaaccaaaaggtcaaaaagtagaagaatagcgaatgtaagttattaaataaatgagcaagaagtatgtgtcagggaaaataaatgcttcttatattgttaataccgtgattccctgcccgctcaccccgtcactcaacacttgatgcatttgttttggaaagtgccattttatgctgagatactggtattgaaaacttccctctttcccaactctgtcagaagttctcttgctctttggaagaagccgagggccttaacaaatcagactgacctcccttgtgacaggcagcctcgcctgcccttggaaacaagctgccagaatgtgagggccacagagacccaagagaagccagcactgctagactgaggaacttgtaaatatcttctgctttcttggtgaacaaggacagaggcaattgcgtgtatattgtgactgtagtttgtgaagaaaatgcaaccatttgcttcgacagctcctcaaatgtacttgttaagtgtgaatgtgcctgcctcattgccttgtgttccaaacacagtactgaatgcgttgtttttaaataaaccatttcgttttgctttgggaaacactgctggttgtctgtcacattcgggagagcccccacacacacatacacacacatacatgtgctaacacatactcacatttcatccagtgaagagattgaatgcttcctcctgttttatattctcagtgttttgaggtcgttggaaatttgtaggaccccagaaagggtgagcttggctgtctacagccatgaacaagcaggaaatactcaaagtccctacacataacttttccattggtcctttaaatgctaatcatgtgacaggccttaacattattaataataatacattactcttgaaagttactattacatacatcattttatttaatgaataatcaggtgagggagagatgctgagggagttgtccctgctgtgcagttaagtgacaagtcaaaatgagaactcagcctgactccctgtccagttctccttcctctgtacctttcaccccatcccaggctctccctagatcacctcctcatagaaccttccccaactgctacagtcagcctctatcccctttccctgtgctggttttcttcatatcattttttaatggtactattaacttgtttactcattgttgatctgtgtcatccactatattataagctctaccttcaacaaagcaggaaacgttgcctgtctattcccactacacccccgatgcctagaacagtgctatgagctaagtagactctcaattgatatttataggatgaatagatggatgaatgaatgggcagatgggggaaaggagagatggacagatggataaatggatgaacaggtgcaccatggagtctgtgtaacacttcaactgtttctcatcatccttcccatctttgtacccacaccacagacaccaaaagtcttagcttttctctaactgtgctgcctcagacagcattgtgaacaaaactcagtaagcatttatggactcaaggaatgaacgaatagtcctaggaattatttttctcaatatctgtgctccagtgtcaaaaatgtctcagcatatcaatgcacaaaaacacatcctgttcttgttcctggttgatttcaatttccagcaaaaggagaaactcaagttgggtaaaaaaatacagcatgattgaaagcatgccaccttcagtagacacctgagagggcctgtgggtctttaattcaaacctaaaatccttactgttcgctgcacataacactgggcaagatatgaacaggatacgaaattagcaaaatcacaatgcttatccgaaggaacttaaaaaatcttcttggggaaatggtgcaacatactacaggtgtatgtcttataaggagaaagagagagacagaaagaaaaagatgaccccctgaccccattaaatttgagtgaagacaacaaaaattttagtggtcaaatgtaatgctcagggcttatattttctgaaaactatttgcccagctgatgatccctggcaaatacacacacacacaaacacacacacacacacacacacacacacacacgcaaatggtaagttctgaaacaaaacaaaacacttcacaaacttcagcaaaacacgaaattgacaccaagtttattgcaggctctctgcctgaggctgattagtaccaattaaaattttaaagtagaaattttttttctaagaaaatacattaccatagcttaagacaaggaagaatttttttaaaagagatagaaagagagagaatccctcctcatagaagatccaacctagcccaaggctcccaggccagtaaagatgctggccttctgattccatctaagcaagagtgtgagttcgccctcggactaggttcccacacaggttgagggtccaggggtggctggtatcagcctcagctccagaatcattccccgttttgagtgtgcaattcttggtaagtgaggttggctcaaggaatatgctgctctgaacattaactcatactgctcagaatggcagagctgatcagaaacttagagattcagtcaattcaatgctctcatttccagatgaagaaactgaggcttgggaagagaaagtgacttattcagatacgctctcctagtgagcaatagtttaagtaccttatcaatttttaaagaaagaaaaagaaagttcttttttatatcaactacaaattctcaactctaaataaaagtatttaaaatggcagtctgctcatttcacttaaattaacttatttttattattactaaactattcatcaaaaaagttggaaaatgagataagcaaaagaatatttttaaaagacctaaacctttcatctgttttttctgagtgtgtatttgttctgtacaatacatactattgtgttttctagttttttctcacttaaaattatatcaacagcatcgttccatgtcattaaatattctatgataaactcagaacatgaaagcactataacttatttaacctcttattgttttaaatgtaggttctttgcaactttacattgctgtaaacagtgctctgatgaacatctttggaattaaatgtttgattatttccttagataaatcccttgaagtggattttcaagaggtatgaacaatttttgtaagaggactctttttcaggaatatttgagaaaaaactcaatgaccaaatttctaaatctttattttcctagaaaacttaccaacaagttaggagaaaaacatgcatcatcattaaggaagacttcctcaacagaaggattatgcattattgtgtactaaataaggaaaataaataagctattgttgtgtgcttcttcaattcagttaccacatctcttgtttagaatctgggagaacttcacacactcaagacagaaagcctatgcaattgcattatcattattaatcaaataagaagcacccaggaccatctggaagagatggaccttcaatacaatgatagatagctcttttccttattctgagagtatgtttattgcttactcaatcctaccaacctaataatgcttccaattcacattaagcccaagaagtcaaaatgaggaggttgaactaaacaatctacctgaggctacacaaatcctatagatcagttgtttttgttgaacctcttttaatcaatatctccatttctataggagagatgtgaatttgctttaagcaaattcaaactatgaacatacagattttcaaagcagatattattaaaggtagccaaagcagtcaccacaggcttccctatctaccactatcgctctcttaagtaaatccgtatttctgcccaactaaaaaattgtaaatatggccgggcgcggtggctcacacctgtaatcccagaactttgggaggccaatgcaggcagatcacgaggtcaggagatcgagaccatcctggctaacacggtgaaacccagtctctactgaaaatataaaaaaattagccgggcatggtggcaggcacctgcagtcccagctactcgggagaccgaggcaggagaatggcgtgaacccgggaggcggagcttgcagtgagccgaaattgcgccactgcactccagcctgggcgatagagcgagactctgtctcaggggaaaaaaaaaatcgtaaatatatttatcttcgttggccttatggcttctcttgtaactcctcagctccactgttgcagcacaaaagcagccatagatgatatataaatggatgagcatggctgtgttccaataaaactttatttacaaaaacaggcagccgccagatctagcccatgggaccacagtttgccaacccctgctttaagaaacaagctccttactgtatataaaatatttcatttgaccttcatcgtattagtctcccagggtggccataattaattactgcaggcttgggtccttatttatttatttatttatttatttatttatttattttaaaacagggtcttgctgtgtggcctaggctggagtgcagtggtgtgatcacagttcactgcagcctcaacttcccaggctcaagtgatccacccacctcagcctcccgagtagctgggaccacaggcttgcaccaccagggctggctaatttgttatattttgtagagacagggtctcaccatgttgcccagactggtctcaaactcctgggctcaagcaatcctcccaccttggcctcccaaagtgtggaattataggcgtgagccactgcgccaggcctgacttagtgtcttaaaacaatagaaatttattcccttgaggttctggaggccagaagtttgaaatcagcatgtcagcaaaattgattccctttggaagcgctgagaaagaatgcaattcatgcttttcccttgcttttggaagctgccaaacccttgtcattccttggtttttagaagcataactccagtctatgcctccatcttcacaagggttttctgtgtgtctgtgtctgctccccttctcttctaagaatttagtgcccacgcaaatccaagatgatctcatttcaagattcttactttaattacatctgcagagacccttccctctggaaaacattctgaatgtccaggtggacataatctttttggggtcacaattcaactcactacatccatttacagcaggacccctccaccaaataactcaaggattcacagagtagagctcagggaacacaattcagtgacacacagactcagatgtactctagatgtgactggtccccttcagaggtaacaaatctaccttgcaaaagtccaacagcattattgggtgatggaagttatgtcctcaaattatattttataaaactttccaatgtattagacagtaaatatatgcgcttccaacaacagattcaaaaacaaagcaaacaccacctccaagatcaacaaattctaaagatgttcctaatatataagaatttatgtcccacaccaaagacatgctcagagccaaggatattgatctcatatgagttttccagctgggctgcatgcaccacaatgaaaaaaaaaaaaacatggatagagaaaatatgaaagttgatcaacctatgacatgaagtgataagttcagaaaaatgtctaaaatgtttcagtggacacagttgttcaacaccttaaagatcaatttaaaactcattctcatctttgcagcagatatcacagatatatagatatagatttaaacaactttagtcacaaacactaatatgtctgatttagcttccagaaacctttgtgacctaatcagcaaacaaaacctattgggaactaaggtggaaatttagtcggaaatatttttctcagaaatggaacacattgaaactatctttaacaacgtgtagaaaatagaaacagtagctgattaaatgacttaaaggagagaaaagtcagaattcaacaggaaatcagaaactaaagtgtccacaagacttgtttcctccttttggaagtactatgttcttcaaaatgaaacaggaaaaagaaaattttctgccttcaagtatgtcaataccagaatggctgcttggatccttcatcctttggagacaaaagtatatgtaatgtgaagacttctaagaggacatggcctaactgatctttcctgcagatagcctagagtatccagattggaggcacaccacatcacatacccccaatctgggtgtctagaccagggaattatcctcttgtgccagggaccactacacagcttatttgttctcattctttaatccagccctagcagaaagtatttccatgtgatggatccaggaaacactaggggagggagaagcaatgatggaagagggtaagttcagtgaatctttggtacaaaaggagaagggttgggttgatctggatgttatctaaagaagagaatcatgaactacaaaccagggacaaaagatcattctcttagctctttgtaattccctgtgttccttattgatgaatacctagactgtttccatgttgcaggtagagtttcctctctgacagcccctttaagtagtctgttatgggccgggcacggtggcttacgcctgtaatcccagcactttgggaggccaaggcaggcggatcacgaggtcaggagttcgagacaagccttagccaacatggtgaaaccctgtctctactaaaaacacaaaaattagccaggtgcagtggtgggtgcctgtaatcccagctacttgggaggctgaggcaggagaattgcttgaacctgggaggtggaggttgcagtgagtcgagatcacgccattgcactccagcctgggtgatagagcaagactgtctcaaaaaaaaaaaaaaaaaaaaaaaaaacaaaaaaaaccgtggtctgttatggtctgaatgttggtgctccccaccccaatgcatatgttgaaatcttaagccccaaggtgatagtattaggagatggggactttgggaggtgattagatcatgaaggtagagacctcatggatgggacgagtgcctttataaaagggaccccagagagtgtcttgccccttccaccatgggaaagcacagagagaaggtgccatctgcataccaagaagtgggccctcaccagacaccaactctgccagcgccttgatcttgaacttcccagcctccaaaacagtgagaaataaatttctattgtttataagccaaccagtgtactgtatttgttatggccactcaaatggactaagacatggatggtcccaggatgctgcttcaggaaaatcctcttctatttatttctttctgcctacactaaccttcctcacacatagaccctaaagttccctctcacttagctcccagcttggtgcccccttctctgctgcccctgtatggatgtaactccaactccagatttcgccttgttttgtaaccaagatcactcttgagatgcacaagccacaatctcaggcttattatggtgcccccaaacctaagccaggcccttgggaatgactgaccaagcccacagcaccccaataaccaagcctatttagggagggcaatcagacaattatgagaataatcccaggagctgggaactagaaatctagcctcctctgctgccagtttggggacataaagaagcccaagggataaaataggaagtagcatggtgatgaagaaagaaaaattaaaagagaaattaactgagtccctgtaggtagggagaaagtatctgtagaaagagaggcaagaagctggagtgggcagattcctgataacgtcacagacaaaaatgcatcttcaaaaacacattcatgattttgcatttctagtggtgtttaagtcagccacatgaatttctgctgttaaaccattgagatttggggattaatttattatcaaagcataacttagcttatccagattaatacaataccttagaccttaagctttcaaaaacaaatatgaccgaaggatggtgtgcatatagaaactgccccaatttaacctattggtatccagctacagacctgacctcccctccagataggcttgcattcccctctcctattccctcctcctgaggtggaattattctcccaccctgccctaaagtccccaccatggatggcattccttgtatttgttgcttctttggattttagctcatcttgctttagatttctgctgtgtaccttgcaacccaactaatgtaagttctttgggggccaggaccacctccccaacctcttcatgtcctttactctgatgcattcctagcaggtacacagtgtttgctaaccgcacaattgctgagatgtacctgttgctcttcttacaatcatgtctgtgaagtccctgtaacagctcatcctgtatccttggcagtatcagttctatcaacagaaagtgtctcatacagtttcagaaacaggaagatggtgtgtctcagtttgtggtctttgtactaaacagactaaacagcaaattgtaggataatttactcctcagtgattggcctgtctcaggcccagccagaaagttctgttgtggttgttgttgcttttcttcaaaagtaaattgctctgagaggtcagcacacagtatgatgctaatggaatagtagagatagttttcatgagtctatatatccaaaaaatcccttcaccttccaatgttcaatcatgacacttccctcttatccctttaattagcatgttaattaacagtggctggctgggtgtagtggcccacacctgtcatctcagcactttgggaggctgaggtgggtggatcactgagccctggagtttgagaccagcctgggcaaaacggcaagaccccagcctgggcaatatgacaagacctcacctctacaaaaaaatacaaaaattatctgggcatggtggcccgtgcctgtagtcccaggaggccaaggtggaaggattccttgagcctgggaggtaaaggctgcagtgagctatgatcacaccactgcacttcagcatggttgacagagtgacaccctgtctcaaaaaacaaacaacaaaacaatggctatctctgcacgttgagatttttgtgcctttctgtattttgtaaattttctccagtgaacatttatttttatgatctgattttatgatttataaacatttattttttgccttctccctctaccccccatgcatcctctcccctgcaataaaacctgatgatttcattcagaatacagttaaagacatgctaaaattccctcaggggatatcaaggcctcgtctatggctcagtcccatctgtaagtgaccatcctgactgggggaagtactgtgatgggtgtcttcatccatcaacaaaaatgttcagccaagcaacagaagctaagcaagagaagtcaataggcccctacacttgtacagctacacacaggagtctcagtctccacagaaagttgtcccaaatcaccaacttgggctggatgccagtggtgccccattaacactccgtggtgttcctggtgggagaaccagagtgggcaccagcagctccatgaaccaggactcaaaccggggagcaggaaggaaatgtcttggtcaacacaaccccagcctactcctttccactacctagaaacaggacgccaagagatgatactttccaggtgaacaggcaccaaaagtgtgggattctcagattgagaaccagagaatatttagaatattaacattggaatttagaatggaattcagacatttcagaggctcagagaagcaaaacgatgtctcctaagtcacacagcttgcaaatgacagaggcaagactggactgtaagtcccttgagacttcaagtaaattatgtttcaataggaaagaaagaaaattcagcctatagatatggaaaaacacagcaatattagcagtgtctgtggtcatgaagtcacagagatgcaagattggactctaagtaccttgtcatgcaaaggcatgacatcacactggaaaaagcacagggacatcagaaccaagtgtgcctcaccttcctgggaccagaatcgccccctcctggttccttagcccaggatagatccactgggtcatgtttgggtacaaagagatcatatttagcagcacaaaaattggaagactgcctcctgttctagctaagaagctggatttatttataaataaacttatttataagagtctctgtcctcctaactctaagcaggatgtctgttccctcttctaaattccacttctctcccatgaccctaaggagggtcactaacctttggaacattatccagttgccccctaaatattttctactccctatagcacttaaattcacatgtatattacttattggatgccttctaggactgaattctagtcatatgtctcttttagtaaattgaatcccatcaacttgatgttctaatatttcagaatggctagaacctagtcacttaggaccttttcctcaatcccttcaaatctttggcagccagaggtgacattaatagtttttattatctatggcttttataaatcagattaatcagttgccttccaagttttttttaaggtgactgttgtaaaggagattcattattttcatattatcagatcaggggaaagcaggatccatttttcatcctattgagaaattagcttcatttcaacaatagttttgaacctagaaatgtcaatgtcttcttatcaggaaatctgtattatttcacaggcatggaaggcagcagcccatagactggaagggctggaggcctttctaaaacccctctcactgctgtgcaatattggccatgctgatagatcctgatgcagcatcagatcaaacagaacccctgagatcactcatacaatccaactcctggatgcagactgttgctgatatgccactgtcacctcatatggcctgagacattttaaaaatgcttagttgtagggcagcaattcacccctctttgcccaggacaggagcagtttccaattcttgtactggcataattatcaacatagctttatttaattcactctaatgtcatgatttgggcaatatataataaaatggtcatcctatttactgatcatctagtctgtccacttcttttcatacaaggggaaactaaaccccagggaagtgaatgacagatatcagctcccaaagggaggtgatggcaccaactgaccaccccaaccaccagccagccaggctgtactggcatcttcatgacttcatgactacagacattctgctaacattgcttgtttttccatatctataggctggattttctttttttccaattgaagtataatttacatatttaaaatacacagtttttaaatgttcagtttcacgaattttaactcccaaaacaacatacaaaatatttctgtcaatcctgaaaatttccactgggcccctttcagtcaattctcccaccttgaggaaaacatattctgatctctggccccaccaattattttgcatgttctttgacttcatataaaaggaatcatacagcttataggtctggaaggggtggtggagggaatgtaatcattataaaatatacccagttcgagccttatctgtaataaaggcccactctccagaggaaaatattttgccagcgccttataccagcttggggaagagaattcctcccactctagcctgctgtagccttcctgtcttacctaagagagaaaaaaaatgcaatccacagagctcagagcttcaagaaaatagattgggagtggtgcagccagggataggaaagagaactaaagggaaaagaatatgactgaagaaacacttgtgaagttcacctctctgagacacaggcccactaaaagactgagattcaggttagagaatgttctttctacatataccttactactacaccaaaagaatactagtataaaacaggggcatacagccgaaagagccacaaaaacatagacactgtctgagaaggaggacttacgaaagcccaaagtcaagaggacacaaaaacaaggataatacaagaagctgaagcctttggcacctgtaactacagcacatattaaacacaatccaagtcttagtcaaattaatgtaaattctcacactaaaggcctatttagctcagtttctattacccaaagcagcatgcttggctttcaagaaaaaactataaagcaaaacaaaatgaaaaaaaaaaaaccaacagaatccaaagagacaatcattaggtcagaaataatacagatgttggagtaacaaggaattttaaataactatgattattatgataaggactctaatggaaataaaagacaacatgaaagaacaaatgggtaatgggtagaaatggaaacgctaagaaagaatcaaaaggaaatgctagaaggtagaatggtggttaccaggggctagggaacggggtttggaagatgctggtaaaaggatacaaaattttggttaagtaggaaaaataaattcaagaaatctatttcacaacatagtgattatagctaataccatgtattgtattcttgaaaatcactaagagattttaagttttctcatcataaaaaataagtatgaggtaatgcgtatgttaattagctcaatttagtcatttcacaaggtatatatgtttcaaaacaacatattgcacataataaatatatgcaccttttatttgtccactaaaaataattaattatttttaaaaggaaatgctagaaatcaaaaatgctataagagaaatgcagaatgcttttgatgggttcatcagtagactgaacatagccaaggaaagaatcagtgagctcgaagataggtcaataggaacttcccaagcagaaatacaaagaaaagaaagagtgaaaacaatagtaacaataacagaacgttcaataactctaggataatatcaaatcgtacaccacatgcataattgcaataccaggagaataaaaatgtaatgaaacaggagaaatatttgaagtaacaactgttgagaactttccaaaattaatgacaccaaaccacatatctaggaaactcagagaacacgatgtttttcagttctgctactttatcactgatttttctgtcaattgttgagggggaataaaatgaccaattatgactgtatctttgtctgtttctccatttaaaaggtcaattttatgtcttaatatttaagttatctcattaggcataagtacatttaggaatattacattttttcatgaattggcccttttattattataatatatccctctttatctctggtaatactcttgaagtcactttttaatatattaataagctacccaaactttcttatgcttagaatatggatggtataggttttccacccttctacttttgatctgtttgtatcttcataaagtgtgtttcatgcaaaaatcacatagattgtgtgtgtgtgtgtttatttaatctgacaacaaaggtcttttatgtaggatattcagataatttacatttaatgtaaagtttactggaaacaatatatttgaacagatgcttcatcaaagaagacatgcagatggcaaataagcacatgaaaatatgctcaacatcattagccactagggaaatgcaaattaaaacacaatgaaatgccactacatactcatataaatggctaaaatcaaaaaggctcactaccaaatattggtgaaaacacagagaaattggttctctcatacactgctggtgcaaatgtaacatgatacagccacctcgaaaaacagtttggtagtttcttaaaaagttaaacatatatctactctatgatcttgccatcctattcctttttatttacccaagaaaataaagcatacgtctatacaaaagtttgtgcacaaatgttcacagcgtcttcatttgtagcagccagaaactgtaaataaccaaaatgcccgtcagcagatgaacggataaaacacacagtggtggccaggtgtggtggctcacgcctgtaatctcagcactttgggaggccgaggtgggtggatcaggaggtcaggggatcaaaaccatcctggctaacacggtgaaaccccgtctctactgaaaatacaaaaaattagccgggcatggtggtgggcgcctgtagtcccagctactcgggaggctgaggcaggagaatggcgtgaacccgctaagcggagcttgcagtgagcagagatcgcaccaccgcactccagcctgggcgacagagccagactcagtctcatagaaaaaaaaaacaacacacagtggtatagctctacaactgaatactacttagcaataaaaagagaggaactagtgatatgcccaataacatagatgaatctcaatgtaattatgttaagtgaaacaagccaaacctaaaagagtgcgtaaatactgcatgattgcattcacataaaatttttgaaaatacaaactagagtgacagagagcagaccatcagctgcatgagaatggaagggtaggtgaggagggttgagagggaggattacaagtggacagaaagaaacttttggaaatgatagatacattcactactttgtggtgaaggtttcatgggtgaatactgatgtcaaacttatcaaattttatactttaaatatttgcaatttattatgtcaattatagctcaataaaactctaatatattttttaagttatttggagtccagttggtttcttatccctgcctttgtgtgttctcccccggccactgcactattcctctttcctaggaaaagctcatcactttctgggttatatttgcttcaggtttctttccatccttggctctctgattttttatagtaaagtttatgtaacatacaatttataattttaacaatgtttaggtgtgcagttcagtggaactaagcacatttacattgttttgcaaccatcaccaccattcatctccagaactttgtcatcttcctgagcagaaactctgtctctgttaaacaattcccatttccctctttccccagccctgggcaaccaccattctactttttgtctccattaatttgactgctctaggtaactcatagaaattgactcatataatatttgtccttttttggctggcttatttcacttagcataatgtcctcaagattcatccatgttgtagcatgcgtcagaattcccttcctttttatggctgaacaatgttccactgtatgcaaaccacacgttgtttatccgttcatccattgatggacacttggatggcttctactttttggctactgtgtctgatgggttttttaagttatggttttgtagcttatctggcttattcttctttttaaggtggaaacagtggtattttgcaacctcctattccctgacaagaattagaagtcctctatatattgagttataatctcattttttaatctggcacaaaatcctagaattgaaaatatatccatggcctatcaaagaacaataacaaatcattaaaaaaatccataagtaataaagcctctgatttctaaaagagtttatgtttttcaatgtctgtgatgagatacctgcagcacaaataggtatgcagtcacagctgggtagaaactagaattcacatgcttcgattcttagtctagttgctctcctgcgacattgtgttgtctccatagcattagtgggagatgtaacatcaaattgagacatgatttcaccaattagtccatttttaaataagctgatatgtaagtttaacaaaattccaatagaaatttcaaccagataatggtaatagaaggcagagatcaaggcaaaggccaacttaacttgacaaaatgactattaatctcagcctgaagaataaccatcaaaaaaatccaaaaattattgaaaaacaattagtaatgaatgactagccttggcagatattaaaacatattaaaaagttactataattaaaagcatattgctagtgaatgagcagacagaaaaatcaatatgttctcttcttaacagaaattctgaaagcagatccaagaattcagtatctgattttaatgacattttaaatcagtgattaaacaaatggtattgagaaaaattggctaagcacctgggaatgaatagtaagaatgttacggtcattcagatttccatatctaaagagaggttgttgttgccattctcattgtactgttgtttttaacaccatctctcatgtttccattaatataatctgtcccattgtatttatttttttgtttcattcaccaggaaatttttaccagatcactcaaacatttggataactaatcaccttgtaaacagtcatttacccaaagtaagcaacatttttactggcaaatttttacaaattgggatttctttcataggacaagctgcaatggaaaaacgaaggaatattctttagatattttcaaaactgacatattatttacaaatattcaacaaacacaaattaaattcattctacggggccatcagtgtgctaagtcctgaggatacaaaaatgataaggctcagtcctcccttcaaaacactgtttaacccatcagttatgtcgatagtctgtctgcaatatacgtcaccaatttgctcattgttagatcacattgtttggttgtaataataagagcgcatggggtaaaaatatgaaatactagacaaaaatctaaaattccagaaaaagtattcaatatagattttgcttattagatctgtgcagagattaagcaagatcattagcatctgatacctgtgtctgaggatgttcactctagcagatttgctgaacgagatggatcctcgagtctttcccctctcgccccacaaagcagacacagctggatgctttatcattgctctaccctctccctgaacaaatctgacaagctgatcacattaggccgtgacatacaaaatatggcataattgtagactgtaatcatcacgatgatagctgacttgataagagaggtcaaatcccatttttatatcctgaattcctaaaatattgtttcgtcaaaaaaatcaatttctcatttttctagcgttaacttgaaaagggtataattgatcaagcctaaatcctttatatcacccaggactgtgtgaaaggctcagacccagcaagccacttgagttagggcccggcgaacagcagttgtctccagcatctaacacccatgggcctgaacggcttcaaagcaagaacacgttttatatcccttggttaagactgtggggaaaacacaggctcacggaatatagatgctcagctggctcatttgggttttgtggtccaatttgtggatgagatatttataaaatccggtgattacaatgccatctcattaacattcgttaaatgaaaaccacaaagtgcaggatgagaactccagtctgaggggagaggaagaagatgcatagggaggctggttttgctacctcagcacaggctaaaagagagacctgagacagaggacctctcccacttcctttaagtaagacatgtgactgaaggacaaagggagggaagaggaaggagggtagcttttctatttgtcagtttttttccatctctgtgcaaaccaaatctaagtcaaggccaacccgattttcctatgaattcaaattctccattccttgtaagatttagccaaggagacatctcctccaggatgtctgcctaggctacatttacccccatgagatctttgcatgctcaataaggctgtgtggactggactccactcacagtatttcagcacacagctgttgttcctgccttgtgactgatttctgcccctgtccctgtggggaggagtgtggcttcatagaaccaaaactacagtgtcagaaaagcctggattccagtctcagctcgggcacaaatagtcccagaacctctggtaatattcactttgcaagaaagatacaggggcagggattggtggaggggagattatgcaaattccacaatatgtatctagcaagtgggcacccaatagtagttataattattattattttattaatattgctgacttttctcttttagtcaatctcaaagtcacaggcagtttagataatgcattctatgtagactcagcaataggataattcattcagtggacagttagtaaatactaactaaatgtatgaatgatgctacatccactaggagaacatttcaaagttgggctccatcttcagtgatttatcaaatttagtgattatggctactctgtgtgcagaaactttacttaaggactctgcaaaattttcagacaggtctgtcttccttcttggtcaaatatagaaaagtctagatctccagctttcttctctcctaacaccctactgcaccctagtccccatgacaggcacaaatgcacacacacacacacacacacacacacacacacgcacacatgcacacatacacagagccaagattgactcaatggtgctgactcactaaatggggagccagaaatttcaaaggaatatgcagaggcagagactatcagacttctgccgcactgtcaaccaaaaatcctgacccatgtctgtatcttttgtgtatttgggggtgacaggcagagggccatcagccagaaagaactgtttctgtgactttaattccatggggccttttgtgcttttcttctgcagaccagtgctgcatgtataattaaccctctgcaggctgagtaactgaagcacaagactgctgtccagaagaagcagaagactgaggctgttctcctgagggccaaatagagaccaagaagaggaagttacaagtgtgaggacgattttctaaccctactagcctgaaggcaatagaacaggctgcctcggaaggaaacaaaattttccagatgatgacagaaactgttggagagattcttgcactgggaggaaacagaagtggctagcctctggggttccttaaccttctcagattcggtaagcaggcaccactgaaaggctgggaggcagaagtaaagtgagcacctttgatgcagtagttttggagccattaagaagctactgcacttccctgtttattatgtctaggttcatatgagagagtagattgttatacacagagtcacatcattctattcattaaatgctttcaccaagggacgaagaggtttggagaaaatattttgtttcatttttcagcacaagaatcttaaaagccttgacttgtcacctaatggttccttccttacagctggaatatccttaaactccttgttcgaacttccaaacacacactctccttgtccctacgtttccctctcaattccaccctatgaagcttaagtagaataagcagcagacagcctggtatgattttaaagacatccaaattcccttccacccaaaatctagctcctctacctaattgcaactgtccctgaaaaaaaaactgccatcagagacacgggtttaggtcaaagcaattattcaagaaggaccctggcaagtgcacaataagcaccataaacctagaggcacacattatttttaccaacttcctagcaaagaaagtgtcctgaaaacactggtagcaagaccagaagatctagatgagggcagggttggggaggaggccagtatgcaaggtgaaagatggatcatagagttaagagaatggcaaaaccacgagaagtatcaaagtaagggaggggagatgagtagccaacagttctggagtagagtggaaacacttcctgagtggctattctgttctgagcactgcatattgtactgaaaaacgtcatggcctttgatgtcagccaggcctgtgctcggtcactaactcagcttactcgtggtcaggtatttaagtccatcagctctggttttctcctttgttttgccggggaattaaatgagataactgtgcatgacacagtccttggcacatacatgttattcttctcaccctcccttcaccctacttctacaatttgacaagattgactcttgtctctttgctagaggttctagctgttccagacaaccacactacccaaagcacgttcaatttcaggaaggtgctaaattccactagccctgggcctcaagcaagcatccatctccagaatctcagcagaggagttctgcagccatgctcaatggtgaatactatttttctttgaaaataatgacagggaggcagagcaagatagcagaatagaaggctccaccaattgtcccccctgcaaggacaccaatttaacaactatctacacccacaaaaaaagcaccttcataagagtaaaaaaccagatgagcatacaccgtacctagtttaacttcacattgctgaaagaggcactgaaaaggtaggaaaaaccatcctgaatagtcactgccactcccacccttctccatgcagcagtagtgtggtgtggacagcatttttgcttgctgaggagagggagagtacagcaattgtgaagcattgaaatcactgctgcagaaagtggaatcagactgaactcagctgacacccacccacagacagagcatttaaaccagccctagccaggggagaatcaccaatcccaatagtcagaacttgagctcccactagcctcaccaccacaggctaaagtgctatgggtacctaaataaacttgaaaggcagtgtaggccacaaggactgcaactcctaggaaagtcctagtgctgaactgggcccagagccagaagactggcatggaacatgacttactgtgagacactagctgagacagttaaggaagtgctggaatcaccacctcccctaaccccaaactgcacagatcacagctccaaaggagatccttcttttcttctacttgtaaagaggagaggggagagtgggaaggactttgtcttgcatcttggataccagctcagccacaccatgatagggtaccactcagtcatgaggctccctttccaagccctagttcccagatgacgtttctagacacaccctgggccagaaggaaatccgctgccttgaaggggagaaaaaaaaaaaaaaaaacagccctggcaggattaatcaccagctaacaagagtccttgggccctgaataaccagcagcaatacccaggcactacatagaaggccttgggtaagactctgagactcactggcttcaggtgacagtcagcacattcccagatgtgatggctacagggtgagactctttctgcttgaaaaaagtgaaggaaaaggaaaatgaactttgtttttcacctaggtaccaggttggccacagaagggtagagaaccaagtaggctcttgggatccccaattccagaacttggctcttggatggcatttctggacctgccctgggccagaggggagcccactgccctaaagggtgagagggtgatttccaggccaggcagcatttacaagctgactaaagagcccttgggccttaagggaacatcagcagtagtctggcagtaccctccatgggcctgtggtggtgatggccatggggtgaggctcctctgcctttggaaagaggaaagaagagtgggaaggactgcatcctgtggtttgtgtgccagcttagtcatagaacaccaggtagacgtctaaggtttttgactctagtccctggctctaggatggcacttctggacctaccttgggcctgggagaattgttgccctgaagggaaggacacaggcctagctggcttgaccatctgctgactgtagagtcccaggaccttgagcaaacatacgcagcagcaaaggagtgattactgcaggccttggatgagatccagtactatgctggcttcaggtctgacccagtacagtcctagtggtggtagacacaggggtgcttatgtcactccatccccagttccagatgacttagaacagaaaaacagacttcattagtttgtgagaaagtaagggaagagaacaagagtctctgcctgataatccaggggattcttctggatcttgtccaagaccatcgaggcagtacctctgtgagtctgcaaaaaccacagccttactgggcttggggtgccccccaaaagcagatacagcttagatcacaacacccaagttctttccaatatctggaaagccttcccaagaaggatgggtacaaactagcccagactgcaaagactacaataaatacctagcccttcaatgcccagacacaggcaaacatctataaaaatcaagaccatctaggaaaaaaaaggcaccaggggccaatcctggagaaacagaaatatgtgacatttcagaaagataattcaaatagctgttttgaggaaactcaaagaaattcaagataacacagagaaggaattcagaattctcccagatctatttaacaaagagattgaaataatttttaaaaatcaatcacaaattctagagctgaaaaatgtaattggcttacgaaatatgcatcagagtcttttaatagcagaaatgatcaagtagaagaaagaattagtgagctagaagacaagctattttaaaatacacagaagaaacaaaagaataaaaagcaatgaagcacacctacaggatctagaaaatagccttaaaagggtaaatctaagagttttggccttaatgagggggtagaaaaagagatggtgtagaaagttattaaaaggaataatagcagagaacttcccaaacctagagaaagatatcaatatacaagtacaagaaggttgtagaacaccaaagaagactacctcaggcatttaataatcaaactcccaaaggtcaacataaagaaaggatcctaaaagcgcaagagaaaagaaacaaataacatacaatggagcttcaatatgtctggcagcacacttttcagtggaaaccttacaagccaggagagagtggcatggcatatttcaagtgatgaagggaaaaaaaccttttaccctaggctagtatatccagtgaaaatatccttcaaatttgaaggagaaataaaggccttcccagacaaatggaagctgaaggatttcaccaataccagacttgtcctacaagaaattctgaagggagtactttaatcagaaagaaaaggatgctaatgggcaataagaaacaatctgaaagtacaaaactcactgataatagtaagtacacagaaaaacacaaaatataacactctaactgtgatgtataaactactcttatcttaagcagaaggtctaaacaataaaccaatcaaaaataataactatgacatcttttcaagaaaaagacagtacaataagatataaatagaaacaacaaaatgttaaaaagcagggggacaaaattaaggtgtagtatcttcattagttttctttctgcttctttgttatgcgaacagtgttaagttgttatcagtttaaaataatgggttataagatagtatttggaagcctcaagataacctcaaacttacacggatacacaaaaagtaaaaagcaagaaactaaatcatattggcaaaatgcctataatcctagcattttgggaggccaaggcaggcggactgcctaagctcaggagttcaagaccagcctgggcaacagagcaaaaccccgtctctgctaaaaaataaaaaattagccaggcaatgtggcatgcacctctaatcccagctagttgggaggctgaggcacaagaattgcttgaacctgggaggcagagtttgcagtgagccgagattgagcccctgcactccggcctgggtgatggagtgagactctgtctaggaaaaaaaaaaaatcaccagagaaaatcaccttcaaatcacctgcactaaaaggaagataggaaggaaagaaagaaagaaggaagagaagaccacaaaacaaccagaaaacaaataacaaaatggcaggagaaagtcttcacctatcaataatgacattgaatgtaaatggactaaatcaaaaagatatagagtggctgaataaataatttttttaaaagacctattgatgtgttacctcaaagaaatacactttaactataaagactctcatagactgaaaataaagggatggaaaaagatattccatgccaatggaaaccaaaaaaaagagctatacttatatcagacgaaaatgcattgcaagacaaaaactataagaagagacaaagaaagtcactatgtaatgataatggggtcaattcagcaagaggatataacaattataaatacatatgaacctaacattggagaccccaggtatataaaacaaatattattagagttaaaaagagagatagaccccaatacaataatatctggagacatcaacgctccactttcagcattgaacagatcttccagacagaaaatcagcaaagaaacatctaacttaatctgcactatagaccaaatggatatttacagaatattttatccaacaactgcaggatacacattcttttccttggcacatggatcattctaaaagaacatatgtcaagtcacaaaacaagtcttaaaacttcaaaaaattaataactttatagctataaaagtgtttacatcaaaaaagaagaaaaactttaagcaacctaacaatgcatcttaaagaactagaaaagcaggagcaaaccaaaccaaaaattagtagatgaaaagagataatacagatcagaggagaaattaatgaaattgaaatgaagaaaacaacacaaaagatcaacaaaatgcaaagttggttttttgaaaagctaaaattgagaaacctttatccaggctttaaaaaaaagagagacgttccaaataaataaaatcagagatgaaaaaggagacattataactgatactgcagacatttaaaggatcattagtggctactatgagcaactatatggcaataacttggaatctagaaaaaatggataaattcccagacacatgcaacctacaaagattgaaccatgaagatatccaaaacccgaacagacaaataacaagtaatgagattaaagccataataaaatgtctcccagtaaagaaaagcctgggacccaatgactttactgctgaattctaccaaacattaaaagaagaacctataccaatcttactcaaactattctgaaaaatagagtaacagaggatacttccaaatgtattctacaaagccagtattactctgataccaaaaccagacaaagacacataggaaggaaggaaggaaggaaggaaggaaggaaggaaggaagtaaggaaggaaggaaggaagggagggagggagggagggagggagggaggaagggacagagggaggatgaaagagagagagagagaaaagaaagaaagaaagaaggaaggaaggaaagaaagaaggaaggaaggaaggagaaagaaagaaagaaagaaagaaagaaagaaagaaagaaagaaagaaagaaagaaagaaaagaaggaaagaaagaaaacaaactacaggccaatatctctgatgaatattggtgctaaaatcctcaacaaaatacaagcaaataaaattcaacactatatttaaaaagatcattcgtcataaccaagtgggatttatccctgagatagaaggatggttcaacatatgcaaatcaattagtatgatacattatatcaacagaatgaaggacaaaaaccatatgatcacttcaattgatgatgaaaaagcatttgataaaattcaacatcctttcatgataaaaaccctcaaaactgagtataacataactcaacataataagagccatatactacagacccacagctagtatcatactgaatagggaaaaactgtaaaccttttatctaagatctaaacatgacaaagatgtccacttttaccactgttattcaacatagtactggtagtccttgctagagcaatcagaccagagaaagaaataaaaggcatccaaattggaaaggaaaaagcaaaattatccttgtttgcagatgatatgatcttctatttggaaaaacctgaagactccactgaaaaactattagaattgataaacaaattcaataaagttgcagaatacaaaatcaatatacagaaatcagtaacatttctttttttttcttttttttattatattttaagttctagggtacatatgcacagcatgcaggtttgatacataggtatacatgtgccatgttggtttgcagcacccatcaactcatcatttacattaggtatttctcctaatgctatccctttcctagccccccactccccgacaggccccaatgtgtgatgttccctgccctgtgtccagctgatctcattgttcaattcccatctatgaggagaacatgtggtgtttggttttctgttgctgtgttagtttgctgagaatggtggtttccagcttcatccatgtccctgcaaaggacatgaactcatccttttttatggctgcataatattccatggtgtatatgtgccacattttcttaatccagtctatcattgatggacatttgggttggttccaagtctttactattgtgaatagtgctgcaataaacctaagtgtgtatgtgtctttatagtagcataaaaatcagtagtatttctatatgtcaacagtgaacaatctgaaaaaaaatttttaactaatcccatttacaatagccacaaataaaattaaatatctaggaattaaccaaagaagtgaaagatctctataatgaaaactataaaacattgatgaaagaaactgaaaaacaccaaaaaatggaaagatattccatgttcatggatgggaagaatcaatgttgttaaaatgtccatactacccaaagtgatctacagattcaatgcaatccttaccaaaatatcaatgacattattcacagacattgaaaaaacaatcctaaagtttacatggaaccacaaaagaccaggatagccaaaactatcctgaacaaaaagaacaagactggaggaatcacattacccaacgtctaattatacttcagagctacagtaacaaagtagcatggtactggcataaaaatagatgcataaaccaacagaacaaaacagagaacccggaaacaaatccacacacctacaatgaactaatttacagcaaagatgccaagaacatattctggagctgagaaaactggatatccatatgcggtagaataaaactagacctttatctcttgccatatacaaaaatcaaatcaaaatggattaaacacttaaatctataacctcaaactatgaaactagtacaagaaaatattgaagaaactctccaggacattggtctgggcaaaaatttcttgagtaataccccacaaacacaggcaaccaaagtaaaaatggcaaatgggatcacatcaagttaaaaaactgcacaggaaaggaaacaatcaacaaagtaaagagacaacccatggagtggaagaaaatatttgcaaactactcatctgacaagagattaataacgagaatacataaggatgtcaaccattctataggaaaaaaatctaatgatccaatttaaacacgggcaaaatacttgaatagacatttctcaaaagaagacatacaaatgacaaacaggcatttgaaaaggcactcaacatcactgaccatcagagaaaagcaaatcagaactacaatgagatatcatctcaccccagttagaatggcttatatccaaaagacaggcaataacaaatgctggcgaggatgcagagagaagagaaccctcatacactgtcagtgggaatgtaaattagtataaccactatggagaacagtttggagattcctcaaaaaactaaaaatagtgcttccatatgatccagcaatcccactgctgggtatatacccaaaagaaaggaaatcagtatatcaaagagaaatctgcagtctcgtgtttgttgcagcactgttcacaatagccaagatttggaagtaacctaagtgttcataaacaaatgaatcaataaagaaaatgtggtacatatacacaatggagtactatttagtcataaaaaagaatgagatcttatcatttgcaacaacatggatgaaactggaggtcattaggttaagtgaaataagccaggcacagaaagacaaacatttgcatgttctcacttatttgtgggatctgaaaatcaaaaaaatggaactcatgaagatagagaatagaagaatggttagcagagactgagaacggtagttgggagatgggggtgagaggaaggggaagaagggtatagttaatgggcacaaaaataattgttagaaagaatgataagacctagtatttgatagcacaacagggtgactatagtcaataataatttaattgtacattttaaaataactaagagggtataatttgattgtagcacaaaggataagtgcttgagggaatagagaccccatcttccatgatgtgacaattatgcattgcatgactgtatcaaaacatctcggctgggagcggtggcttaagcctgtaatcccagagctttgggaggccgacgcgggtgaatcacctgaggtcaggagtccaagaccagcctggccaacatggtgaaaccctgtctctactaaaaatacaaaaattacccaggcatggtggcgcatgcctataatcccagctactcgggaggctaaggtgggagagtcacctgaacctaggaggtgaggttgcagtgagctgagattgtgccactgcattccagcctaggcaacagagcgagagtgagactctgtctcaaaaaaaaaaaaaaaaaaaaaaaaaaaaaaactcatgtactccataaatatatacacctactatgtacccacaaaaatttaaaaagaaaataatgaagcactgcagatggaaccagccattatacaaacaagctaacaaccttttgggaaaccatgtcaaccagacagtgcaatgaaccagccagtggggatgaaaaggtatccacaaggtttactaaatgactgcctttcaagcagtctggactgccttgaaaaggagagaagactggcccaaagactgcataagtttaaacaaatcctcagatcatcaccacaaggctgatgtcaccaaggctgagtcaccatcatacgtgattccagaagctagggctgtaagaagtcactgcactaatgtaaaggcaagaagaacacatgccaaacataatgtctaagcagctgaaggtgctgtggcacttcctgctatttacccaggccaattatgtccggttctagaagaaaatgggatgaactagaataacttctccagtggtaaggagtctggattactaacagttcaagtataaatgtctttatccagttgaatggacctcattcattccatgaacaaatatttatagagcacctactatgtgccaggcactggtgtaggtgctgaggatacaactgtgaatcaaacataagctctgacctcttggatttcacatcttagcaaggagacagacaataaacaaagacaaaaagaaagaacaaagggagggaggcaaaatgtatcactatctaaaattaaaagctggggtcatatgttagagtgactaggtgacctgaatgacaagaagccagccatgcaaacatctgggtgacagctatgagttcttgcctcaggtttcacagaatcatgtacttttcttactgaaagggacctcagtgatcaacttcaacactccattttttatatataatgaaattgagactcaggcaagtagtatgatgtctccaaagccactctgaaaattacacagggacttccctgtttattttcgagaaggcttaaacagacaaaatgataattattcaacaaacatgtattgagccagtacttttttttttgagccctgtaatgaccactctaaattcttcagaggaaaatgagaaatacacaagtgaagtaagcagagaccccttctgtactaactgcaggcctgaccatttgatacaaagtagcaaggaggaagatttacatgggtgattcaccccagaaggctgaatagaggaggtgggatgagtaggattttgataagcaggaaaggcaggagggtgatcccatcaggagaaacatactgaatcagtgcagaaaagacaaagaatggggcggggaggactcagggagtccctaggaaactagggagtagttgaggagggatggggcatcaagactggggatggtgacacctcaaacacagagagagagttgggggaagaggagttgtaagacatataaatgtcaccaggctcaccctttgcccatcactcagtacctatcaccttccagcttgcagaggtgctaacatttgaggtactcaaactcatcttgatccttttttctcatccccttcactttttcttcacaacaggtgctgcactgggtaccctatacatatcagctcaaaataataccagttatccactcattcattcagcacttcatgcctcctatgtgtcaggcatgaagctaagcactttacaaagaatatgtcttgtaagccccacagtaaccctatgaggtaggtacttgtcattacaatcttagctagcaaactgaatctcagacaggttaaataagttgcctgaggtcactcagctggaagacagtggagctaggattttaatctctgtcttttgaactccaaagcccaagcactctctaatttttactatgaaaatattcaaatacaaaattatatagaaagcaaaatcaaactttgcctccttcatcatctagccatcagccagtcctacctgcttgaagactagaggtattttggctccctctgaaattctctttttacctcttgtcaaatttcccagacatagctcaactatggacaacttgtaccaacatttgtttcacaagctattactaagtcctccacacaggaaatatggaacgtatttccacaggtttttgagcctttgcaggtggcatagtattatcagtatcacatctttctgagacacacaaaaaaagaattggttaaaagatggaagaggaacaacagggatgaggcatgagcaagttcagaggacacatgtaagcttcatgaacaggtggtccaggcccacatatcctccacccctgttgccccagcaccatttcttcactgtgagggaggccttcaggaccagctgatgtaggagaaaaaaggctgagttgctgctgcacttcaacacactcttgggtgacccagaagactgcaatgaaggcaaatcttcccagtagtcagagcttcaggtgttgccccatcacccaccttacgtgggaagataagtggtccaaggctaggctatacaataactcatggacaatggcctagctggttattcagagggttggcagatcatttggaagactgaggacaaggaggtctaggaagaggcatgtgaataacctataggaaaagaagatgaatgataaaaatctttatattatttgttgattctcattacatagcatctctgatggaagacaccaaacaaccaagttgacagaatgaattggccaactgacttcagcctattttttttcatcagccactccagtgctgggatggtgcccgatcacatttagtagcagtgattgcacgaatgaagcctatgcatggccccagcttaccaaagctacttgctgctgctgctgctgctgcttgccactgtcatcaccaaatgtccaccctgccagcaacagagaccagtgctgagcccccagtggtggtaccgtccctcaaagagatcaaccaggcatttagtgtcaagtcaattacattggacctcttctactctgaaaagggcagcaatctatcttggctgagatagacacctgttgcagctatgtgttttccttttctgctactgctatccaatgatttgcaaggttttaatgtgccaacatgggattccacaaaacactacctcaagaccaagtgacccattttacagcagaggtagtatgacaaagggatacgtgaccatggaatccactggttctatcacatactgcactactgagaagacactggcctgaaagaccagtggcatgccctcttaatgatacagcaaaggggccattttggatattataccctggaaggatggtgcactatcatccaggactcaacatataccctaaatgacctatatgattctgtgtccccagcaggtagaatacataggtccaggaaccaagagatggaatgatttaccaatactgcaaccagtaatcctcctgagatatttgttttctatccactcaaggttaggctctttagatctaaagatcctaactcccaaaagaggaacacttgtacctggggacatagttaagagtccctttgaactttaagctacaactgccactcaattactttgggatcctcataccaagaaaccagcaataaactaaagaaatcaaccaaccaactagcaagggtaatcgaccctgcccatcaggaggggcttagcttctgctacacaatagaagaagggaagaatatgcttggcggtcaggtggtccactaagaggtctcttgatgttcccatgctcaccacttaatggtaatacacaagaatagcaaccatagactgagaagggcacagtaacttggggctcaggaccctctgggatgagggtttcattacttccagcaggtaagttacccagtgcagcacagggaatagccagagtggaggggaatgagtgtgtttaaaaaaaaaggaggggagcagtaataagccttgagaccaaactgcagcagcaagcgctgtagtatttcttactaaactttcacttgtaagctctcaggaaacgagaccaaccaaaattcaatagaaggcattcccaaacatagtgcagttattataagaagtaagtgggtttgagcgacatgagggctggatggggcacactaaggagatctccacccagatcctctcttcagcacagacacactcaaccccttgctgctaagaatactgagtgctggggactcacagctgagttactcaccagcagttacctcagttgcagggaactgcctcatccaggatgacggcccctcctaggggacagcctatggccaatgactggcttatgaagggatacagacgtctgaccacgtgcttcaaacaggattagctccaagaggctgtcccagctccaaacttctgtgtagagccacctgagaccttttttgccacaggaatacaggtcagttgcttcatcagcttacaggtgtatctcctgaaaacacctgcaataactttctgtgtcaagtctatttcaactctgtttccaagtctgtttcccagtacacaatctcaggcagcctcactcacacccattaccacatgccccaagcagaacagcactggaacagagagcaggagagtttcttgtcttggccccatctcctttaagttctctgtttattcaaacctacctaccctctcaaaacctaggtgggtaatcctccctccatgcctcattttgaatctatgagggtacagagattattaaatatacactttgcaaaacactctgttccttctaacaaaaaaggccagtaaagacagtaaggcaaggacatttctgacattttaatgtcagaaagttcacatgctggtgtcatcgtagactagtccatgagaaagggataagaagactaggtcattaaagtcaaatgactctatgaaggtcatttaacctccatgaccctgttttctaatctattttaaaagcttgctctgactaccctcaaaactttcatgagactcttcttggtaaagacaacaatacctacctcatgggtttcttagaaagactagacgaaatcatatattacaatatctggcacatggtgaacacaccacatatggctaaaatcaaatgataaaatgcctgccaatgactttgaaaactcgaacatgctacaaaaatgacaacaattatgattacagtgcaacatatttaatatataatgttttacattttttcagaggattggccttgtgtccctaacatgaatacagttcctcttttccgtttcttttaactacaaagcaactagtgcagtgtatgccatttggtaaatgcttaaaaccttttgcctgacttgcaaggcagggatcagtgagtaataccatgccttggtaacctgtcactactagaaagtgcttctgtaatgttctgtggaagagagattttttattttttgcattagactggaaaaggggagaaggagctacatttccccaaaccacctgagacatcacccaatgatttcaaatgcacttctatttgtctgaaagtattctattcaagagttacttctaaccacctgatatttcagggtgctggtgtatgtgcacccattttcctttgcattttattaaatgagaaaccaaggattgtatctagcctgtgctcaaactttttaatggaatcaaaatcctctaagattatcttaaatccggttaatatttttaagtgggacctgaatttagccaaatagctgggtggtttagaaacatgtctatctgtctccttaaagtgattccatgaatttggatctctgtgtcactgatccacttcaatgttggcatatatattatgaggaaatacgttgatagaaattcaagaaaccctcaaataagtgccagcatatctctagataaggatattttagacagccctaagctatgtattcccttcccatgagtgaggctttttcccttatccctcatctccctctctttatctattattagtgtcctaatctctgcatcaaccaaacagctttctttcccagagttatctcaaatcttactttctactgccttcctaatacacattaatttccagaactcatctcacttgcaaaacttggaatgtccctcatataaataatcactgcaaatgccaggccaggagctttgttcagcttgatttctccccagaggactgagtccaaagcatgcgctgccacctgttatcatggaaaaagttgtaatcattatagaataactacctaagataggccgggcgcagtggctcacacctgtaatcccagcactttgggaggctgaggtgggcggatcaagaggtcaggagatcgagaccatcctggctaacatggtgaaaccccgtctctattaaaaatacaaaaaattagccgggcgtggtggcgggcgcctgtagtcccagctacttggtaggctgaggcaggagaatggcgtgaatccgggaggtggagcttgcagtgagccaagatggcgccaccgcactccagcctgggccacagagcgagactctgcctcaaaaaaaaaaaaaaaaaaaaaaagaataactacctaagatactctgtagcatttggtgtttgaatgacaggtctctgtttcacagaggaaacatactacagaatttttttttcattcattcctattataaaatgttgtttcttcacattaatgaactacattgatattaccctggaagacctataagattcactcatacttgattaatttgagacactgatccccataaatcacagcagccatatctcaagctgacttttgcatagaacctgaaaacatatccttgcagagttccattccctgagttactgctctatgccagagcaacatgatggaagcattagtgctaaagttttgatagttgagtctatgttccttttcaggatagtgcctgttttttcataagatcttcactggctgaccttaaaaaaaaaatgagaagaaacagaaatttcagatgccatggaaagccaggtaaagggtcattttttagcaaaaaattcagaaactctatcagaccatcccatgtaaatggtcaattttatgtcaagcaaattcttcaatcctcttcaatgctgtgtgtaccaacatgcaaatgacccagctgtataaacagacagtggctcatgagacttaaaggtttcagggctaaagagaaacactcctctcactagcaagaccatgagatgagacacagagtccaagcacccaccatgctgctgtccaaggtcttcattcctgcttcctcctcctcttatccagtctccagatgaatttcacatctgatcctaacacacttaaataacagaacttgtaacagaatgaccatatagagtggtaattagaggcatggtcaggcagacctccattcaaatcccagcttcgccatttattagcagtatgatcaaattacttaacctaattctaagtttccctttctgtaaaatgaggatagtagcagtttctatctcataggtttgtcgtaaggattaaatgagatcaaacaggtaaagtcattgcatgtgctgtcttgtcacattcagctttgcatcccaatgatcagcagagtaatttaaaattttttacatcttgatcaaatgaataaataaatccaaaagagagagataattgaccaggaagcatgagaactatttctagtcctgtcccagacaagtgacttagcctctccagatgttatatacctcattagtgaaatggggataagaacacacagtatgggtttagtcattgcattgttatagccaacatttggccactcagaaatctagccaccaccaaaatatgccagctgcaaaattatcatcagtcttgtcttgtctgactctagtcttcaacatggctgagggtgaggcagggggatccctgagccaagaccaggaactggaatagaataagtaataattgtccttgctttgccacttaccagctgtgagtttcagtagcccattgacctttcctggcttcagtttcttcacagataaaccatgaataataatgttttccctgtattctaccccagtgagttgtagtgacacataaatgagataaagtataacataatactttgaaactgtaaagtgatataaaaaagtattattattaaatttccagcaataggttcttatcacagccatagctggaaggatgctattcaaacctagagatccatttcttctctcactctctcgatctatttctctatctatatactaactacttatctatctatctatctatccatctctgtctcactagataagggaaaagtctttcaattagagattttttgcttcagagttaatgctatatgagttgtaaattatattcaataacaatagtagtttgcattggtagagtctccttcctattgcaaagcactttaaaactgtcacaagctggaattctcacagtaaaatctgtcttgtcacattcagctttgtatcccaatgatcagcagagtaatttaaaattttttacatcttgatcaaatgaataaataaatccaaaagagagagatagttgaccaggaagcatgagaactatttctagtcctgtcccagacaagtgacttagcctctccggatgttatatacctcattagtgaaatggggataagtatagcttgcctcctaatgcagaaagctggaagggagtataaatcctcttattctatagatgaaatgaggataagtgactttatggcctggagttggtaaatacttaacataaatatatgttacaccccacaacacagtattgttttgtgtaatcagtgttcacttatttacccacgtatttgttcttcccaatgctcttcactccttcctgcatttgtttccagatatcatcattttccttctgcctgaagaactctcaaggtctgagagcaacaaagtctctcaattttgtttatctagaattgtatttcttttgccttcacatttgaaggatattttttcactggatataaaattatagttcagcttcttccctcagtaccttaaagatgccattccattgcctctagctttcatattattattctgccaattatatttttggattatttttaagcattgtattttttcacaggctttctgtaaaatttgttagaagcttattatgagagttttctttgtatttatcctttttgaagatcatagaggttttaaaactgttacttgatgcatttcaactgttttggaggatttggggaattatgtcttcaaatattgcttctatcccattttttccctcattctattctggacctccaataatacaggtattaggccttttcattgagttgagtaaattttttatacattttcctatatttacatcctttttccctttcatgctttagtgtaaatgttttctactcaccagtcttccggctccccaaaagagtaacttggacgtctaccatcacctgccaataatgaggcagtcttcctactcttccctgggaaatgtcagaacaagctaactaatgtttaaataaaatccaaagtctcatagcataatactcaaaacatccatgtttcagtgaaaactcacttacacaaataaccaagaaaatatcaacattaattttaaaataagagcaatagtcacatcactaagatgacagagatgttagaactgtataacaaagatgttaaagaatccatcataactgttcttcactgagcaattataaacatgcttgaaacaaatgaacaaatcacctcaagaaagaaacacaagataatcaaatggattttttaaaactcagtggatgagctagacaacagagtggagtgggtagaggaaagaatcagtggaacagaagataaaacaatagaaattacccaatctgaataacagaaaaaaatagactggagaaaaataaacagagccctagggatacatgggactaaaacaaaagagctaaaaatcatataattagagtcccaagagataaaagggcagtgctgaaaaagtacttgaagaaatacagcaaaaacttccaaatttcacagaagacatacaccaaagattcaggaaacatggtaaaccccaacaatataaacccaaagaaatccacactaagacaaatcatagtcaaacttctgaaaactaaagataaagaaaaaatattgaaagcacagaaagagagaaatgatatcttgcctatgtagaaaatacaactcaactggcagtggatttctcatcaaaaatgatgggagccagaaaaaaacatggcacaatatttttcaagtgctgaaagaaaagaactgtcaacccagaattccatatctgcataaaatatccttcagaaatgaaagataaatcaaggctatctcagatgaacataaactaatttttttgccagcagaactaaccaaaaggaatggcttttaaaaatcctctaagtagaaataatattagaaaagaaaaaatattggattatcagaaagaaatatacaaaaagcaaaaatatgaataaatatactaaatttttcttctactcttgatttctcaaaattatggttgacggttgaagcaaaaattataacacagtctgaagtagtattaagtaaatgtaaatgaaatattcaaaacaaatataaatggggaaggtaaggtatgtaaaacaaagtgaagtttctacacttcatttgaactggtaaaatgtcaacaatagcaggctgtgataagttatatatatgtaatataatacatagggcaactgccaaaactatataaagatataaattttaaaatgtagtagataaatcaaaatagaattttaataaattttcaagcaacacacaagatatcaggaacaaacagaaaaacagacaacagaaagcaaaaaattaagcacaatatatcaatagttacattaagtgtaaataatctaaatacatcaattaaaagacaaagattggatgagtgggttaaaaaccatggctacaggaattcgagtccaacatggtgaaaccccatctcttctaaaatgcaaaaattagccgggcatggtggtgtgtgcctgtaatcccagctactcaggaggctgaggcagaattgcttgaaccaggaggccgaggttgcagtgagccgagattgtgccactgcactccagcctgggcaacacagtgaaactctgtcaaaaaacaaaacaaaaccatgacctaactatatgctgctgtctacaagaaaaacaattcaaatattaacataatgaaataggttgcaagtaaaatgatagaaaaggatatatcacgtacatatcaatcaaagaaagcagacatggctatattaatatcagataaagtaagtttcagagcaaagaaaattaccagcaggaagaacattacatcatgataaggtcaatttaataggaagacatagcaatcctaaagagttttcaccagactcagagctgcaaaatatgttaagcaaaaactgacaggactgaaggacaaatagataagtccacaattatatttggaaatgtcaacacctctccctctctcagtaattgatagaacatctttttaaaatcagcaaggatacaaaactcaataacatcatccaccagtaggaactaatcagcacttgcagaacacaccactcaaaaacaggaagtatatacattattttcaagcatttatggaacataaaccaacatacaacatatgatgagccataaaacaaacctcaaaaaatttaaaacaattggctaggcgtgatggctcacacctgtaatcccagcagtttgggaggccaaggcgggtggatcacctgaggtcaggagttcgagaccagcctggccaacatggtgaaaccccgtcactactgaaaatacaaaaattagccagcattgtggcaggcacctgtaatcccagctactcgggaggctgaggcaggagaatcgcctgaacctgggaggtggaggttgcagtgagccaaaattgcaccactgcactccagctgagcgacaagagcaaaattctgtttcaaaaaaaaaaaaaatttttttaaacaattgcaaagatagagtgtgttatttgtccacaaaggaagcaaactagaaatcaataacaaaagtaacaggaaatcttcaaacacttggaaactaaatgatacacttctacacttcattaaggagtccaaagaaaatttaaagatacacagaactaaatgaaaatgaaaattcaatatatcaaaagatgtaggatgcagataaagcagtgcttacagggaaatttatagcactaaatgcttacattagaaaagaggagaagtttcaaatcaataatctaaactcccatcccaagaagttgggaaaagaagagcaaaataaacccaaagcaagtagaagggaggaaataaagagcagaagtcaatgaaattgaaaacagaaaagcaataaagaaaatcaatgaaacaaacagctacttctttgaaaacagatcaataaaattgacaaatctttaactaacaaagaaaaagagagacaaggtacaaattcccaatatcaggaatgaaatagtggatatctcttcagaccctgcagaaatcaaaagtataataagaaaatcatatgaataattctacaccataaattttaaagcttagatgaaatttaccaatgcctcaaaaagcacaaattagcatccagtatgaaatagattgaatagtgctttaattattaagaagattgaatttacaagtttaaaattctcaaaaaagaaatctgcaggtctaggtgatttcatcagagaattctactaattgttcaaagaattaacatcaattccttttttaatttttttatttttttaattgacaaaattatatatgtatatggggcacaacataatgttttttgttgttgttgcttttgtttgtttgtttgtttgtttttttgagatggagtcttgcactgtcgcccaggctggggggcagtggcgcgatctcggctcactgcaagctccgcctcccgggttcacgccattctcctgcctcagcctcccgagtagctgggactacaggcgcctgccaccacgcccagctaattttttgtacttttagtacagacggggtttcaccgtgttagccaggatggtctcaatctcctgaccttgtgatccgcccgtgataatttttgtgagccaccatgcccggccatactgttttgatatatgtatacattacagaatgggtaaaccaagctaattaacatatctattacctcacatacttatctttttttgtggtgagaatatttaaacatctactcttttagtaattctcaagtatacaatgcactgttattaagtacagtcaccatgttgtgcaataggtctccagaacttattcttcctaactgaaattttgtatcctttgaccaacacccctccagcccagcctccacaagcccttgataaccaccattctattttctgtttctgtaagataatttttgtagattccatatttaagtgagatcatgcagtatttttctatgtccggtttatttcacttagcataatgtcttccagatcatacagtatttatctttctatgtctggtttatttcacttagcataatgtctttcagatttatccatgtcattttatccatgtcacacacaaatggcaggatttctctcctttttaaggctgaagagcgttccattatatacatttctccgcttttttaggatgaatatgtatatatatattcacacacaaatgcatgcacacacacacacagtatatatatatatatatatatatatatatatatatatatatatatatatatatatatatgcgtgtgtgtaagtgtgtgtaggtatatatatatagtagtctcctcgttatccacaactttgctttctgtggtttcagttacccacagttaaccacagtccaaaaatattacatacaataagatatttagagagaggtagagaaagatcacatttatataacatttatttaagtatactgttatacttgctctattttattattacttactgttgttaatctcttgctatgcaaaatttataaactctatcatagatatgtatatataggaaaaaacatagtatgtatagggtttgatagtatgaaaagtttcaggcatccatccactggaggtcttagaatgtatgccctgcagataaggggggactactgtgccacattttctttatccattcatcagtcaatggatccttaggtcgattctatatcttagctactgtgaataatgctacaataaacatgagattgcagatatccctttgacatactaatttcatttcctttggatatatattcagaaatggaattgctggactatatggtcattctgtttttaattttgtgaggaatacccattttttaaataatggctgtactaatttacctttccaccaacagtatagaagtattcccttttcttcacatccttgtcaaattttgtctcttgtctctttgataatagccatcctaataagtgtgaggtgatgaattaaacaccaattctgtgaagtctcttcaagaatgagagaacaactctcaattcattgtatgaagctagtattattctgatatcaaatacagacaatgacaatataaaaaaggaaaactacagaccaatgtcctcatgaatttagatgcaaaaatcctagcaccaaaatatgagcaaatggaattcagcagtatatgaaaataattagacaccatgaccaagtggggtttattccagggataccagcccagtccaatactagaaaagcaagcaatgtaacccaccatattaacaggctaaagaagaaaaattacactattatatcaatcaatgtataaaaagtatttgacaaaattcaacctccattcatggtaaaactcttacaaaaataggaatataagagaacttcctcaacttgataaagagaatctgcaaaacccaacagctaacattatactaaatggtgaaagacaatgtgtttgcccctaatattgggaacaaaggaaggatagtcactgtcaccactcttattcaatatagtactagaagtactagccagtaaaataaggaaacaaaaaattatgcagatcagaaaggaagaaatactttgatccttatttgcatgtgtctaaatgtttatatagaaaatcacaatgaatctattttttaaaattagaactaataagtgagttcagcaaagttgcaggagacaaggtaaacacacaaaaatccattgtatttctataaatagcaatgaatatatggctatcaaaatgttaaatataatatcatttataatttttatcacccaaaacaaaattattggggaaaatgtaacaaaatatatataggacttgtatgctgaaaactatgcaacactgatgaaagaagatataaataaatgaagacacatatgtacatagattggaagactcaacatactaaaagatatcaattcttccaaaactgatatacaagtttaacataattccaaccaaaatcccagcaagatttttgtagatacacacatgattatcctcaaatatatatggaaaggtaaaagaataaaacagataaaaccattttttaaggaaagaataaagtgggaggaattagtctacctgatttcaagatactgtctagctacagtaatcaagactgtgtgacattggtgaaaagacagacgcatagatcaatggaacaaagtatggaacccagaaacatacccacatatttatacccaattgatttttcacaaagctgcggacacaattcaactgagggaaagatagccttttgaatgaatggagctgaaacaattggtcatccacaggcaaaaaataaaataaaaaaagacctaaacttcacaccttattcaaaatcaactcaaaatggatcacagacttaaatgtaatatgtacaactaaaaaactatataactacagaaaaaaatgtgagaacatcaggctctaggaccaggcaaagtgctcttagccttgaaacagaaagaatggtccataaagaaaaaattaataaattggactccatcaaaattaacaatgtttgttctgtgaaaggtcctgttaacagggtgagtaaacaagctgcacactaggaggaaatatttgcaaatcacacatctgacaaaggactactatctagaacataaaaagaattctcaaaattcaacagtaaaaaacaaaaacagtaaaaaaaaaaaaaatccaattagaaaatgagcaaaggtatgaacatttactgaaacatatacacagatgacaaaaaagcacatgaaaagctgtccaacatcattagtcactagagaaatgtaaattaaaactaaaataagacattatatacttaccagaatgactaaaatgaaaatatcaatacctaagctggcaaagatgtagagaagttgaatcacatattgctggtgggaaagtaaaatggtatactctggaaaaaagtgtgtaatttctttaaaacatgaaatatgcaactaccaaatgacctagcaactgcactactgggcatttatcctagagaaatgaagacttatattgacacaaaaacctgtacataagtgttcatagcagctttattcataagagccaaaaactggaaaccacattcaaatgctgaatagttaaacaaactgtggtacatttgtgccatggaatattagccataaaagggagcatattactcatatacacaacaaactagatggatctccagagaagatgaataaaaagccagtctcaaggggctacatactatatggttgcacttatgtaatattcttgagacaacaaattatagaaatggatagtagactagttagtggtttcctatggataatgagggaatagatatgtgagggaagtgagcatggctataaaaagtcaatgtgggggatccttatgatgatggacatgttctgtatcttgattgtattgatggtaatatcctgattgtgaaattgtacttagttttaaaagatgttttcattaaagaaaactggataaagtgtacaagggatctctgtattatctcttacaactacatgtgaatctacagttatctcaaaattaaaagtttaattaaaaattgggaagtacagagttaccagttactttgatgggaagactgtgagcgcaattttgggaagtagaaatcaagagtgcttagacatgttgagttttaggtcattgttagagacccaaatatcaagtgagcagttggatatatttgactggagttcagaaaatagttctggactgtatatgtaaacatgaatatcattagcaaataaatgttacttaatgctatggaagatctccttgcataaggaggaaaagaatatagaatcaaaacaagagaaaatctaagatcaagccttaaaaaattccatcatttagaagtcaaaggagacagaactagcaagtctggaaagactgaccagagatacaagcagaaaagcatgttgtcacaaaacaacaatcgaagggtgttttgggccaggcgcaatggctcatgcctgttaataccagcactttgggggacagaggcaggcggaatgcttgagcccaggagtttaagaccagcctaggcaacatagcaagacctcatctctacaaataataataataaaaaaaacatagccaggcatggtggcaaacctgtagtcccaaatactctagaagctgaggtgggaggattgcttgaacccaggaggttgaggctgcagtgagctatgatcatgccactgaactccagcaagaccctgtccaaaaaataaagtgtttcaagaatgcaaatgtgttgtccacaaactgtagttgagaaaatacaagataatgggaccagacttataacaatgaaattgcctagtctctgatttgcatgatctaatgcaaaaccgtctgtgcaattttaagtatttttgtttttctcatttttttttttctggtcataggagaaggagcaaaatcataggctctctttttggacctagtttcattacctcaactgacactacttcctaagaaaaacattccatttttttaaggcagggcttacacttactctccttcatgttcatttattggactcaacctctgctgtcctctgctattcttctaccctcactatctcctaccattctgtccctgctcacactgtgtgcaaacatcctaagcacatgcctcactggtttgttcttctcaatctcttttggtactctccttacatttccaaacagttccagatccttacgttttccctatttagatacactctctagattatctcaaccagtcctatggctttcacatatcacctatacacaaacaactcttaaatttctgtctctagccccaacttctcaccttgcctcctgacttatatccaattgcctgcccaatatctatctcctcttgaatgaataatagacacttatagttaacatgcacaaacacttgatttttccccattcccaacttgttcctctttgtcttccccagctttcatggagctccctaataaatggtgtgatagttttaaaacatggtcccaaattctttgatgctccaatgtcccctcctccttgaatctggaatgggcctgtgatgaattctaaacacagaatatggtagaagtgacgttatgtgacttctgaggctaggtcataaaaaaccatgcagctttttcctggttgtcttagaatgctcattctatggacacttcctaatggaatactccttcttaaagcccagccatcatgcagtaagaagcccaagccaatggagatagcaaaaatgattgttgtttaagctcactactttggggcattttgtagtgatagagaactggaactgatggaacctgatggtagctttattgtttcaatttttgagaccagaactctaaggtcatccttgacgcctttccttttctcacattccatatccaaaccattagcaaatcctgtcagctctctcttcaaatatgccccaagtctgaccaattctcaccaatctgaccaattctgaccagtatctcatctataaagtgaatctctcctaggcagagattcttggtgggaaacaacagaaactgactcgagctaattttcacagaaaaatattaggcaaaaggaacccagattactcacagaatagactgaaagggataagaaccaagttcagaaaaggatctgaaatcaatgggggttaggtgcaagaaccacagccagagaaccagctgggttggcgagctgcctctgttggacacagaacgcaccaccacaccagtgcaagttgtaggctgtctccacgccatggtctctctggcatctgacatccaaggaggtgtatcttactggttggatctagatgacatttctgagtcacagctatcaggggatggggaaaaagagagtttgggctttttggatttcacagtaagaagtaggatcctatcttccataaaaactcattttacatttcacagtgcattttctaaacacaataagtgggtacaaattctgagcagccaagtaaaagtgaatgtctaagggttgggtgaagagaaaatgaagtattttctattacaaacaggctcccaatgtatgttaatgtgttggaaatataactacattgtgaattaaagccttggattcaagtcctgttctaccacttactgaatgtgtgacccttaaccaattccttaagttcccagagattaaggtttttcatcttcaaaatgggaacaataacatcactcccacttatcttacatgctgttttgaggatcaaatgagtgtgtgaatactttgaggcactcttttagttctcattcatctttgtaacatggttgcctagcttaaggccagcctggagtaggtgttctataaatgttccataaaggtccagaattagcaataactacagaaagaatttgtaaaatgaaagccattaattaatttatgcaaataagtcatctatgtaggccagaaaagtatgatattgtcatccagggccagacttttttttttctttttttttttttgagacagtcttgctctgtcacccaggccagagtgcagtagcgcgatcttgactcgctgcaacctccacctccaaggttcaagcaattctcctgcctcagccccccaagtagctgggattacaggcatgtgccaccatgcccagctaatttttgtattttttagtagagacggggtttcaccatgttggccaggctggtcttgaactcctgacctaaggtgatctgcctgcctcatcctaccaaagtgctagaattacaagcgtgagccatcgtgcctggcccagggccattcttaagaaatatcaagtatgggaggaggccctgacactgatcatttttgccactgacctctttataaaataaatatggaaatagaagaacaacttatgcttcattatatagtacaaatttggttcacagagaaaactccttctgtgacaaattttagggactcattaatagttcttgggaattatggtaccatggggaagttatatagcttattgtctagatctctggccaatggattcaagttatcctgagaaacaagaaatatcaaactataggataactaataatacaagtgcacaatctcttaaccaaatcctttagagacagatgctttagaattgagaatttttcagatatttgaaagattttagcggtaaatattatttattacataacccccagcaaggtctggggcagcactttctcatcaaacacaacaatatttctgcacaggtatgtgtgaatactaattctaagtggaataaagactataaaaaggctgagtgcagtggctcatgcctgtaatcccagcactttgggaggccaaggtgggcggatcacttgaggtcaggagttcgagaccagcctggccaacatggttaaaccctgtatctactaaaaatacaaaaaaaaaaaaaaaaaaaaaaaatagccgggtgtggtagcatgcacctgtaatcccggccactccagtggctgaggcatgcaaatggttcaggagggaggcagagattgcagtgagccaaaattgcaccactgcactccagcctgggcgactgaggaggctatattaaaaaaaaaaagactataaatagcttcatatcagttcagttatggttacttcaacatatgaaattcaaaaaaacttctggtttttagagctttttggaattttagaaatgcagacaagaaataattcttgtactttccataaagaaattgtacttttcataaagaaatggtttttatagagatagaaaatgctccatcatgtacttttaacgtctttataagcttgaatattaatattagtctaacccttaaaattatctacataaaattacgttcacaatatcatttttaagttttatttttaattgaaaaataactgtacatatttacggagtacaacatgatgtttcaatacatgtttacattttgtaatgatcaaattagagtaattagcatatttggcaactcaaaaatttatcatttctttgtgatgagaatatgcaaaaacctcttttctattttgaaatgtataatacattgttattagttatagtcgctctactgtgcaatagaacaccaggttttattcctcgtatctaattgtaattttgggcttattgaccaatgtctcccttttcctcttccacccctttcccccaacctctggtcacaataaggtcatatgtgacagacccactactaatattacgctgaatgtagaaaagctgaaagattttcctctaagatcaggaacaaaacaaggatactcactttctcctcttctattccacatagcactggaagcctggaagtcttagccagagtagttaggcaaaagaaagaaattaaaagtatccaagttggaaaggaagaattaaattgttcctgtttgcagaaaacatgatcctatatattaaaaaaaaaaaaaaaaccctaaagactgtactaaaaaactgttagaactaataagcaaatccactgaagtttcaggatacaaaatcaacatacaaagttcagtagcattttcatacactaatagcaaaagatctgaaaaagaaatttaaaaatcctatttacaacagctacaaaaaaataaaatacttagaaataaatgtaatcaaggaggtaaaagatctttacactgaaaactataaaacattgatgaaagaaattgaagaagatattaaataaatggaaagatattccgtgcttatggcctggaagagctaacatcgttaaaatggccatgctgaaaaccaaacatcgcatgttctcactcataagtgggagttgaacaacgagaacacatggacacggggagaagaatatcacacaccggggcctgtcggcagggtggcacgctaggggagggatagcattaggagaaatacctaatgtagatgacaggttgatgggtgtagcaaaccaccatggtacatgtatacctatgtaacaaacctgcacgttctgcacgtgtaccccagaacttaaagtatcacaataaaaaataaaaataaaattttattttaagtttgaataaggcagtaaatcaaataaatcacctttaagatataatttaaaaatatacctccaggaaaaaaaaatggccatgctacctgatatggtttggatttgtgtcccagcccaaatctcatgtcaaattggaagaggggtctggtgggaggtgattggatcatgggggtggatttcccccttgctgttctcatgataatgagttctcatgagatctgatggtttaaatgtgtgtggcactcctcccttctctctttctctctcttactccaccatggtaagatgtgcttgtctccccttcaccttcaccacagccatgcttcctgtgcagcctgtggaactgtgagtcaattaaacctcttttctaaataaattaataaattatacagtctcaggtagtttttgtttgtttgttttttgttttttgggtttttttttttctgagacaaagtctcactctggtgcccaggctggagtgcagtggtgcgatctcggctcactgcaacctctgcctcccaggttcaagtgattctcctgcctcagtctcctgagtagctgggattacaggcatgcaccaccacgcccagctaatttttgtattttcagtagagatggggtttctccatgttggtcaggctggtcttgaactcccgacctcaggtgatccacccacctcgacctcccaaagtgctgggattacaggcataagccaccacgcccagcccaggtagttctttatagaagtgtgagaatggactaatacactacccaaaatgatctacacatggaatgcaatccctagaaaaataccaatgacattcttcacagaagtagaaaaaacaatcctaaaatttgtgcagaaccacaaaagatcccagataggcaaatccatcttaagcaaaaagaagaaaactgaaggtatcatactaactgacttcaaaatatactacaaagctatagtaaccaaaacagtatagtactggcataaaaacagacacacagaccagtggaatataattgagagcccagaaataaatccatgtatctacagccaactgattttcaacaaaggtaacaagagcacataaaactgatatccacatgcagattaatgaaattagactcttatcttttactacatacaaaaatcaactcagagtgtattaaagatttaaatttaagacctgaaactatgaagcttctagaagagaacacaggggaaaatctccatgacataggtctgggcaagggctttttggataagacctcaaagcacaatcaacaaaagtaaaaacagacaagtgggattacgtgatactaaaaagcttctgcacagcaaaggaaacatcaatagagtgaagagacaactaacagaatggaagaaagtatttgtaaatcagacatctgataaagagctaatatccaaaacatataaggaactcaaactacacaataacaagaaaataaataatcctatttaaaaatgggcaaaaaacttgaatagacatttctccaaagaacacatacaaatggccaacagatacatgaaaaaatgcttgaagcaagcaaaaactctctaaacatcagaaaaatgcaaattaaaaccacaatgatacatcacttcacacctgttagcttggctatcagcaaaaacatggaagagaacaagtgttgctgagcatgtggggggaaagggaacccttctacactcttggtagtattgtaaagtagtaaagtagtagagccattttgaaaaaaatagtacggagtttcctcaaaaaaactaaatatagaattaccatgtgatccagcaatctcactactggttatatacccaaaggaattgaaatcagtatgctgtagagatgtctgtactcccatgctcactgcagcattattcacaatagctaagatttggaaacaaccttagtgttcatcaatgggtgaatggattttaaaatgtagtatatatatgaaatgcaatactattctcctatttcaaaaaaatagaaaatcctgtcatttgaggcaacacagatgaacctagaggataatatgttaaatgaaataggccaggcacagagggacaaatactatataatctcattcatctgtggaaactaaaaaagttgaactcataagagtagagagcacaatattattctttttaatgtccaattcagcaaatcctgggattcaaccaaagagatcatctatttcaacctgctgcctaattcagctgattcctactaatagcatcctagccaggtagtcactaagcctttgctaaacagtcatatgagtgaagaattcactccttcatggggcaagctgctgtcctctagacaactttaatcactggaatcaaaatcagcccctctgtcacttttaccctttggtcctaactctgacttagaacaggaaaaactaacctctctgccgcgtgacagctatgcaaatatttgaagtggcagccatgcaccacattattggcctcttctctaggctaaacatttgctctaactcttccacataaagcatgatttcctcttccctcacatcctaatgacccatgtaagctctaatttattgatatctatattaaaattaggtacctagagttagattcatctccagcccagaagacagggaatttgctacctttcttgtaagttgtatgccatatttcttgtaatgcagcctaaaaatgcattatctttttttcatgccgcataatactgttgagccatttgcatttatagtaaataaatgcttccttctttctcacatgcattcttgtcacaatccaggaacctcccttgatttctatttttcagcctaaataaaggactttatattggtccttgtaaaattacatgatgtttattgtaattctaacatgcatattccattttgaatcttgattttgtctttcaatatgttagctcgagaatattatattaagtgaaataagcacagaaagacaaatgccgcatgctcacttacatgtgaaatctaaaaaagtcaaactcatagaagcagaaactagaatgatggttaccaggggctggggagtgggagtgggggaagggagacactggtcaaaggatacaaaattttagttagacaggagaaataagctatagtgatccactatacaacatggtgactccagttaataacgtacatattgtatacttgaaaatcactaagagagtagattttttaatgttcttgacacaaaaaaaaaaatatgttaggtggtacatatgataattagctcaatttagccattctgcaatataaacaaatttcaaaacatcatgttgtaaaccataaacatataaaatttttgtcagtcaaaaatataaatgagaaaaaattcttttccttcctgaaatgtgtgtgtatatatatacacacatacatatattgtgtatatattacatatataacatatatatatatacaagatatataacatatatatacaagatatataacatatatatacacacacaaaatcaatttcctactatgggtctcacccagaaagtttacaaacacagtattaaagtatgagtgagatttgaagtagcacagaggagaggagaagacaaggaaaaatcttatcccattaaggatgaataaattcctataaaacataactccttcactgaccaccgtactcaccccaccccagctacccaccactgtaagccatcccaacatgcagaaatcaatattttaagtatatatatttttaagtgattgtttggtattccaaggtattactcacttttaaaattggtcatatgagggctcagttacaaggcaagtgactctggtttaatatgtgttcatttgatggacacccagttttttaaaaaacaccaggaatacaaatacaaaatatccaggatttctgctgtttgcttatattgtgtaacaaaactaatgttaaacatgacccttgaaactgtcctggcatccttcagtcagatactatgatgagtatgatgagcccatagtaaatttcactatagttccacttggaagaaaatactttttcctaagttcttagatgggaataacttaaaatctcttcagaagaaatacccactcaaaaatctatagtaaattttaagaagtcacgtaactctgaagcgattctggctcagtgatcacttcaaattgtgactgtttttttcctctctctctgttctgtttcttttgcctttcttggtctgaaaatacagagaggtaccaaaaactcagtacataatttgaaactaaaagcaacaaacccattcattgaagtataataggtcatttggaaataaaattcattttttaaaaagagaatccttttttggaatccatttttggaatatgaagtcaatcattatagctttattccatcagaaatagctttttaaggctataactcccaaactatttggattaagaattaaaatatctaaagagcccataggaaattaacccaatcatcataaaggtcccattttaataaaaggggatccatatcaaatcagactttacatgtggaagggaccttgaagagcatctacagaaggaaatgcaggctgtcggtcacacagctagacaataataggattgggaccagaatgcaggccctgcctcttgatccaggacttgttttcactgcacccttgaccttaagagggtgatggagtagacctaattcctcctaaaccagtcatttataacttcctctgaccaacatccaatcacgtcaaaagagaacaagaaaaaacaaacaaacaaacaaacaaaaaacaggtggaaacttagtccattactttgagatgggatctgactgttttttctctttatacagaaaatggagttatcatcatcacctcactaaaatgtaaggtccatgagaacagggaccacatctaacttattcatggttctcttgcgagcacttatgtggtgacatatttttgggtgctttttatttatttgtttttgtttttactgaccactattcaaacactctattttgaggtgactccctaaagtgtgcagtacaggtgaaatgcagtgctcctttctcagtccctggcggccaggactctagtatatgctctaggagaggtcacaccctaattggctcttgtagaagtgacacgaaaacataggacagtgtggacgttactcttggctgcggcagcagcagcagagacaagtgggtcagcagaggcttcctaaaccagtctattgcagggcatgatcttggctttgttcctattcctagtctcccttggaactaggaattggttcctgcttcactctcctgccttcctatcacttcttcctcatttattcttcctgaattatttggtttcttcctcagacgttctttcctacttttttgtctaaggcagcttctgttgcttgcaaccaaaaattctaataggcacatagtaggcactcaaataagtcttaaatgaaaataaaattaatgaattattatcataatttttgtagaacacttcacaatttccaagcactctctcgtatcctaattactgcacctggtcactgtctcatttgtcttccagttaagttataatatttaacaagggcaaatccttcttgatgcaagagtcaagttaaagaaaattttaaaaatctaaaccaggcttagacgtgattttttccaaagtatgctacgcaatctcatggtattaggtaccactatgaatggtatcatttaagtaaaaaggaagccctaaaaaatgaaatttagaataccaactggggagtaaaagctggaaagtatagggcatgaaataaagtttaaaactttttgaaggaggctgggtgtggtggctcatgcctgtaatcccagcactttgggaggctgaggtgggtggatcacctgaggtcaggagttggagaccagtctggccaacatggtgaaaccccatctctactaaaaatacaaaaattagccaggcatggtggcacgtgcctgtaatcccagctactcaggaggctaacgaacgggaggtggaggttgcagtgagcccagattgtaccactgcactccagtctgggcaacagagcgagacactgtctcaaaaaaaaaaaaaaaaaacttttttaaggaaatttgatatgcaaatagttgcacagaagagatgtagaagtgataactgaaacttcaaatatgagctggcattcgccagatgaaatagcatcaaagagctctagaaaagagcactgaaacttcagataggaagttcacccaccactctaccaggtgcagtggggtagaaacggttcagtgtagaggtctagaaatgagcactgaaacttcagataggagctggcattcaccaggtacagtggaggtagaagtggttcagacgctgaaggagcaacatctacaaaggcaaaaactatgtcccttcaaaacacaaagaatatttgctttaatcatatggctctaaccaagggggggagggttgtgaattcttaaaaatatcttcacccaccccatctcactttactagaaattgaagtcaaccataacccacaccgttctccaagaattaaatgggaaattttataattacaaatggtatttcaaaacttgatgtttcagaattcccttaataattccactaccttgttatcaaattatgttgataaggtaaagaatttgacacagggcatcctatttggtctctgtcaacacgaagcccccaaaccaggtttcctcagtctgatagttggaaaacagttacaaaatccattagtccatctcagtaagggagagaggaacagccattttgtgtgcagtgacctatcctcagccccatggactatgtagcaggagatgtagtggcgaggttccttttttactctctatatctgatctccaaggagtcagtgctcaactctttccaggataaagtctgaagaacacatttcaccaataaaaaaagatagtaaatacttgagtcgtttcagagagagaaaaatatgaaacactgaagatgaagcgcttaaatctttaatgtttttggacaacacagtctatatgttttctgcataatgtatcatttctttaaactatagtattaaaaataatttcaaattgtaatgaaaagtcatttggctttaaaaccacccaggaagaggatataaaatgcgtataccaaaagactatgatgcggcttccagtgtttttctgatatagatcataataatttaaaaaggcttttgtcaggctgtctgaatacatcaaatactttctcatttctgtgtcggctgtgaagctctaactatagtggcttctctagcaggtattctccgcacaactgtgccaaatcgttctgaggacacccagattctcctccttctcaaaacagacattcctgactgggtcctagggcagggagaggggcgttggacccctactgccctctgggttctccgagcaccaggacttgttgctccggcgggaactcgcgcggatccaccggctcggcacatcctgcctacaagtagggcggcgtgtgctaggagccgggccccgggccgagtcgtccgtgccgcagcggagagctccgaccggcgcggccccaccatccgctgaccttcgcccggtccggcctggagcccggccgcggcctccctaggcctctctaggccgggcgccggttcagcgaggaccggaagcgcccgccgtccgcccttccgcctccaggccgcgggcgccaggccgggggcgggctggggacgccctgggagtgccccgggggccgccttcttccccgcaagcccggagcgggcgtcgctcccgcccccgcctcgtcttcagttcccccgtcgcttccgccgccgtgggtagaacagacccgagctgggagccaggcctgcggcccctcgaacactagccacatctggcccgccgggcctagcacggagagaggccctggggcttggcggccggggccgggagaggtcgcgcggccaaggacacccgagggcctgggctgcctccccgcccttccccgcccctcccctcggccctggaatcaatagtggccgctgacttttcacgacaattgcagctgtctaattcatcagcgaataattaaatcagaggccgccgggcctgcctggagtcggagacgaggggtcgctcctctcaaatcctgtcaaattggggagccagtgggcagcgcggagagcggacaggcctcgccctgcgccgaggctgcgagagccgcctggacccggcgccattccgagtgtagggggaagcaagcccccaggtgtggggagcaaaaggaaggaggagggcacaggcgggggccccgccgaggctggactccctcgtcagcagggccctcctggccggtgcgtggtccgggtgcccggcgtggggcagcggccgtggggcccacagacaccatcctcacgcagacttcgcgaatgtcgtggaactccatcctcgggaggcgctttgcctttgaggaagatggagaggagtcgggagaagcgcctagaaaccgcattgatttagacatcaatcctggccggctccctccgcctgccgagctgcggggccgcgccgccccgtccccgagaagcggacctagggtacgccgggctccgccgagcgggcaaagggagcggcctgcgccgccaccccgcgcccgcggcctcgacgccgcagccgccacgccaacaccgattcctcgtggccaacaggtttctcgcagccctccgagtcggcagcgccgcccgcgtccctcttccagccgggccggcgggacgccctcagagcttgtgctctctcgaggccgccgagcccactgagcccggccggggcgctggttcgcgtgggccgcggggaacaggtcccgcttctccaacgaccacggccccggcggctgcgaaacggccacctccgacccttgagtccgccagagtcgctctccctttcacatttgcaagcaaaacaacatacgtaatagtgacatcgaggcacttttccaaactaaaatgatcctaaaataatctgaatgtactgttacttttgatcgtgttaccccaaaagattagctcagattcacttggttcttttatttctttgggagatgatactcgaggaatctgaaaaaatatacgatttttaaaaacgatatgattcgcatacctatttcaacccctcggttggttttgttagtttccaaatagaaatattgccttttgaaatcggagatcatatttctcaagtttaaaatctagccaagtctttttttttttaatactccgtctgaaatttttttccatggtagctagacaattgaaattatacacaaagattttttaactctcggattttcattggaaggggacgtaaatagtttttgtactaatgcctaaacaatattggatcttcaatcaaaaagtattttcagggcaaataaatgatagttttaagagggtaataaataaaagcaacacccgtgcttagtgtctcagggcaacttgaaaacagctccactttcagggagttaaatttgtcctttttacaatcaactgcaacttttgccttcctttggaaaggacgacaaaaagatttcacgcacaacttgaccggaacaaagggacatcatgccagtttttcttttgtggggtgacaactagaagagaggaaaagtttattttaaccatacttgagttgtacttttggaaccctcctttaaagagaaaatgtgacggcagatctttcaacttaaaaatcgaagctatggggctttggggcagaagggacagatagcgcgagcaaaactgaaagtcggtgaggggaaattttgtcttcgttctcagactaagttgcctatttaaaatgaaactttcttctagagcaaaatctccgttcccctaagagctgtgcttcccccaccccttccgcaaaaagaagcccttgggtatttgcaggttcgaatcctcaaccttccctcctttgaatttcattttcccaaaagagtagaattatttctcccaccagcttctgcagcgttagcatccgaaaaatcgggtgggtggggcgttgcagaaagggtctgcagttggccccgaattcggaggaaggaaagtccctggaagggaccgcagtcccagcccccagtcctggggaccggtccggatcagaggcccggccacccacttccacccaaactcctcacgggagggggctgtggaaaccctgagagggcagggagctggagaagcaaagaaatgtacgtgtgtgtgtgtgtgtgtgtgtgtgtgtcagggaagtaagcggttcccgaagacacaaaacttcaacagtcccctatctatatgggtagaggagggcgatcaaggtcggccgccctggtgttcttttaaactagacaggtggacgcgctagcagcttagctaggcagagctgggattccggtttcccctgcagactgacactccctggagcaggtgccaaagccctttggggtggggtctcctcccctttcccctctctcaagcctgcccactctcggcgtctggacttcggaggaaactatagtttgcttcccgcagccctactcccccaccttctaatccaggtgctgggcttggggctcggagagaaccttcccccagcacgcagggctcctgtcgcttctttttcctttccctaagaggccggacaagggtgagaacaagactaacaaccccatatctctccctgccctcacgcaaagtatcttttgtcaaccaaaaagttaagggcagtcccctgccagctctgctaacctggcgttttgaattttaacaagattaacgaagaagaaggagacaaaaaaggacgcgtttggcctcaccacccagaaaaacaaacaaacaaaaactttccaagatccaactggcaaatctgaaaagtgacggtgaattgtgacagtgaatttctgagctgagaggccaaagagaattagtggggcccggcttcggttttagttttattctccctgggctcagccagcccgagctttcaaacagaagaaacctgaagctaatgaagatctcaaacagagccacaattccgagggccccttttccgccacaagcacccactgtccatctgcacgtgtaatcacagagacttgccctgtcttcattaccaggggatccgaggaaaggggagaaaattctctgtcgtgaaaaggaaccttgtgttatcactactattatttgtgtatagcgacctaagagtttccttgtcctcttcaaattcccctacaatattgaaacagcatttgttgccccattcttacaaacgtttgaggcctttctggaaaaccattaccattcaaaggctagaaaattgctctccttccttttttttttttttttttttaaaaaaaaggcaggcgcagcagcagctataacagataacaaaaactttctaccgcataatcctcgccctcagaatgacaaagaaatgatattgacttacccccgaacggatgatgtgtttgataagggagggaaatttttttttttttttgaagatttctgttgaggagctgcacagacagctgcaattcatgggcgacgctgattgccagaaacgctatggattggcatggggtctgcagctcacagatccctgatcaatacccctacactaacacgccagatggtttggggaaggacaaaaataaaatagtccaaatcaacccaccattatgtttttttgtgtgtgtattgctctgataacctagttgtagcataaatgtgttctaccctgacacaaaacctgacaagatttcgagcattggggtagaaattagcagctctcctctaccctagatttgggtcgtggttactgttgtatagtaaaaacaaagatattgggccccttatgcagattgggtttacttgtggtctgtttatctttttccgtgaataatttataaagtatctcttttaattgaatgttcacctctctgtgtgtgtctctctatacctaaaaacaattttattgtggaaaacacatacgaaaaactccgatagtaaatagttattttcctgcaattgctaactcaagttcagaatgtttttcttttacagtgcaatagcctataatagtcttgttgtcgaagctgcattttattttcatgcttcttttgacccatttaagtttctgatcttcaagaaaattggacctgtgaatgtggcatgctaagtgaatatccaggtcctgatataatgcttggtacaactgtttgtccagattctaatagccgtgaattagcacttatcataccacatttctatacagtgtgtttgtaaatcaaatgctggtggggaggggggagaagaggagtgtaacttcaaattaaaagaaaaaattccaagttgcagaacttcttaaggttaaagtatggatgctaaacaaggggcagttagaaagccactttcccttatattttcttaaagaactatagagaaagaaacatcaaaaatatttcaaaaaatacttgaaaatcgtattagtattgatactccaaaaattgtcttgaagtaaaaaacaaatattgttcctttttagaaagaaagagaaaagggcatccaaacctaattcagtaaaaattagggtgctcactaaacaagcacatccattttccttttaaatggattttgggttgaaacataaaacctcaaaccaccattataaaaacaacgtgaaaaatctgctttaattctagtccaatgaaattatacacaaagaagccaatacgatttcatgatttccctgagatcgccaatattgatcgagggaaggcggagggatggtgggagtgagggaggagggagggaggaaggaaggaagcgaggcagcgagaaaatgcaactcacctttctgctcccaggcacaccgaaatataattcccaaaagcaggtttatctcagtgtcctggcaaatgagtttaacattttgaaaatttatttaaatggcaatttatatacctaggtttctgtatggaggaagcatcagcctagggtaactggccactccttgagactgaagccagcagagcagcagaggctaccttagcactggggcatatcagacccactacttcccagttctgcttctctcctgctgtatttcagtccctgtgcactcatggaccaagaacaggttgcactctcgtgaacttttgctcaactcagtattatatttcaaacattaactgactcaaatcatcccaagtgtccagatgccatatataaggtagggagtgcgaagagagacagtaggagggggtgaggaggagaggaaaaacagagaaaccaaaatctgagttattttacctggctcctgttgtgacactagagatgtgagcaaccagaaaagtatgtctggcaaaccagaggatctgccgctttcttactcaggctttgataacacagagaagacgctatttgaaagaataattggcagcgtattggccagagctcaatgaagttgatctatgaataacgtcactgtacattcatgtgacagggtgggggtgggggtgttgctctgaagcaagaagagagaggagggcggcagaaaaggtcactgagactaagaactgttttccaaatgaatcaaacctttctctggcaccaagaagggacatacagtattccgagctctgcccttgttttcttatcaagttttctctaacagctggaagtggttgaagggggctgtcttaaggagaccccctgctcttcttttgacagctgatcaaaagaaaataggtcacgcttctcaaacttatgtccaccctgtccttaattactgtctctttaaacaaaggcaacatctgcgcaacctcagctagcttgaatcttcggaggcaaacagagcgcaacctgctttggaagaatcttgttacgtttaaggctttatgccgggtgttggcctctctgtcttcaactacccctccaccccgactcggactgcagaaatctccaactctctgtcccccagttccactcccacctccagacctggggttgccaaacaacggaaattctaggaagacgtaggtgcggtttttaaagccttggcttgtgagcgttctcaggctggccggggcgctggtcttttcagaaacaaggtttgaatatgcaggtgtcagccaggattccttgtcgtctgcccaccgccgtttctctcccgggatttgagagaagcgggagtgtgtgtgtgtgtgtgtgtgtgtgtgtgtgcgcgtgtgtgtgtctcgtgttaggagaaaggtccgtggttgccgtctcagctggtttgcttactctctgcccccaggagaagtttgctcacttgggacaccagcgaccctcctcacctccacctcaccggttctacactctccccacttctttccaagtcgctgatgcagaaagcacttggtcaccttgaaacggcagctcccggaattctagttttgttttgcaatctagcagggctcttcggaagcctcataactgagatttatgggctcaccgggtaattaaatgatgttattgtgttaactttgcatgcattactgctgcccgcgccgcccgtgggccgccggccggccgcagctcgctggcgacgagggcactacagttgctctgaccgcgtagattatgcatgtcccggcctcgggaatttaccatgcattagaatacattagcgcctgcattttaaaaggctaaactattggctcccagctagggactctcggtaagtggcttgttagtgacgagtgtttgtctatactggcacatagcggagtcttttgctcccggcttactcgcctccaggaaagctttggggtgaggcgaaggcgattgaagcaatgccccttcccccagatcgcagctgctcaggggggacacagcacggcatctttcaccgaatctctctcgctcgctcgcactccagcctccctctccccagcgacccccccaccttctcctccctccctctccttgacgtttgattccagtagcaaaggaggtaaaaaaggcaccgagccgtcagccaaacctgaaaagtgcggccccgccccctccacagccactggtagcttcccgtggaaggcccgcctcccggggcagctgcggcctcggagtggttgcgcttggcgcccgtcgggcgtggccccgccccaggtccgggagggtaggttggctgccccggcgagcggcagagcccttctggacagctcccgctcacccaaacagaagacgtcggcgccggagcgggctcggacatggcgaggctgcgagccggcccgagcggcggggcccggtgatccctccctccctccccgtcccctcccctctcccgcacgcacgccccgtccgcccccaccccgcccccaccccgggcgagcccgcccgcagcccggggcgcacacccgcacgcgcactcctctccactcactcccgcgcccgcccccactcccgcagccgagccccgccacgcgcgccttgcccgcccgccggccgcccccgccgcccccgccgcccccgggccctgatggactgaatgaaggctgcctacaccgcctatcgatgcctcaccaaagacctagaaggctgcgccatgaacccggagctgacaatggaaagtctgggcactttgcacgggccggccggcggcggcagtggcgggggcggcggcgggggcggcgggggcggcggcgggggcccgggccatgagcaggagctgctggccagccccagcccccaccacgcgggccgcggcgccgctggctcgctgcggggccctccgccgcctccaaccgcgcaccaggagctgggcacggcggcagcggcggcagcggcggcgtcgcgctcggccatggtcaccagcatggcctcgatcctggacggcggcgactaccggcccgagctctccatcccgctgcaccacgccatgagcatgtcctgcgactcgtctccgcctggcatgggcatgagcaacacctacaccacgctgacaccgctccagccgctgccacccatctccaccgtgtctgacaagttccaccaccctcacccgcaccaccatccgcaccaccaccaccaccaccaccaccagcgcctgtccggcaacgtcagcggcagcttcaccctcatgcgcgacgagcgcgggctcccggccatgaacaacctctacagtccctacaaggagatgcccggcatgagccagagcctgtccccgctggccgccacgccgctgggcaacgggctaggcggcctccacaacgcgcagcagagtctgcccaactacggtccgccgggccacgacaaaatgctcagccccaacttcgacgcgcaccacactgccatgctgacccgcggtgagcaacacctgtcccgcggcctgggcaccccacctgcggccatgatgtcgcacctgaacggcctgcaccacccgggccacactcagtctcacgggccggtgctggcacccagtcgcgagcggccaccctcgtcctcatcgggctcgcaggtggccacgtcgggccagctggaagaaatcaacaccaaagaggtggcccagcgcatcacagcggagctgaagcgctacagtatcccccaggcgatctttgcgcagagggtgctgtgccggtctcaggggactctctccgacctgctccggaatccaaaaccgtggagtaaactcaaatctggcagggagaccttccgcaggatgtggaagtggcttcaggagcccgagttccagcgcatgtccgccttacgcctggcaggtaaggccggggctagccaggggccaggctgctgggaagagggctccgggtccggtgcttgtggcccaagtctgcgcgccgagtcacttctcttgattctttccttctctttcctatacacgtcctctttcttctcgtttttatttcttcttccattttctctttctcttccgctcttcccctactttcccttctcccttttctttttctttcttactctctccttgtccctgagctttcattgaccgacccccccccatttcattcgccctcccctcaatgtgccaacctttgccctatttccgatcttcccaggtactgggaggcgggatgggggtgtgcgttttcctctaggagccctgtctttccaagacccacagaaaccaggacctgcccttattcaaaaccccatgcacttcaagtctcttttagacaacacatttcaattttccgggctgactagtctccctgtgcagaggcagttgagaggctttgctctgcagagggaaaagagctctctactctcccacccaccatataggcaaacttatttggtcattggctgaaggcacagccttgcccccgcggggaaccggcggccaggatacaacagcgctcctggagcccatctctggccttggcgttggcgcagggactttctgaccgggcttgaggggctcgggccagctccaatgtcactacctacagcgagggcagggtgtaaggttgagaaggtcacattcaccgctttgggaggacgtgggagaagagactgaggtggaaagcgctttgccttgctcaccggccgtccttgccccggtcccagcgtttgctgggatttgccaggatttgccggggctccgggagaccctgagcactcgcaggaagaggtgctgagaaattaaaaattcaggttagttaatgcatccctgccgccggctgcaggctccgcctttgcattaagcgggcgctgattgtgcgcgcctggcgaccgcggggaggactggcggcccgcgggaggggacgggtagaggcgcgggttacattgttctggagccggctcggctctttgtgcctcctctagcggccaagctgcgaggtacagccctctattgttctaggagcacagaaacctcctgtgtgggcggcgggtgcgcgagctagagggaaagatgcagtagttactgcgactggcacgcagttgcgcgcttttgtgcgcacggaccccgcgcggtgtgcgtggcgactgcgctgcccctaggagcaagccacgggcccagaggggcaaaatgtccaggtcccccgctgggaaggacacactataccctatggcaagccagggtgggcgacttcccatggatcgggtggaggggggtatctttcaggatcggcgggcggtctaggggaacaattcgtggtggcgatgatttgcatagcgcgggtcttgggatgcgcgcggttccgagccagcctcgcacagctcgcttccggagctgcgagctcaggtttccacccccgatcccccgggctttcctcgcaccgctgagcccagcttgtggggtgcactcgaccaacgcccgacagggctggggaatgtgacaggcagcaggttcacccgggcttggggagggggagtttccgctttgacagcattttcctttgccgtctgctggtggattcctattcccagtcggtaatcgccccgcagtgttgatctaagaaggtaaagaaaactaggtttccctgcaaagagcctcccccaaatcggcggactccggatactttgagtggatttagaaatttatgtaatctttctcctttagtttatttttcatcctctcctacagttttctctgatttgctgttggttcggggcaagataaagcagccagtagagagcgataataatagcggcgggaaatgaactggagactggctgacagttcttaacattttgtcatagatccccccgaatgtcccaggctgtctctggtgggttttagtacccgccggcttcttgggcaccggggaccagaaggaacttggcagctggtcttaggggtacagttaaaggcaggatgacagctattctcctgctcatctcagagcgctgccgccccctcatgccggtcgcgcaaagaacacagcttttaaaaaacacgtgccttctgcccatataggtctgaaagtgatgaggaaagtaatgcttcgcctattagcgagtttcagcttttaaaatgatcccaagcgttgctgagatgagaaagcgtggcatcccgggggtcctcagccccacccgcgcccatggtgcaagtctgcagggacaggcccgggacagcactgcccacgctgctagattttccgcagaggatcgctgaagctgccttcgtgggagacagaatgcctcctccagcgagtggaaaaggcctgctgaggaccccgctttgctcgagcattcaaatgtgtgtctgttttattaccctgggttgaaaagggacaagagctttagcctttttatctggccattttatcagcaactacaagtgtgttgagtggttattattacataggaggcttttcagtttggggtcagtagatcagtctcttcagacactgatgcagaagctgggactggtaagtaggtattatgtgctcggagcgctaggggacaggagcaaatggagaagaaaagcggaggctttctccgcccggagtatcgatcggaatccccgccggtacgccgcagagggccctcgccgttgggccccgggggtttaacaagcccagccgctccgcaggcggctcggccggactctcagaccggtgcctggaagacaccgtccctgcccccctcccgccaaacctgcctcttctctttctctcataggttataggttccctttctctctcattttggccccgcccccgggtcctgccaaacagccaagcaggccggggtttagggggctcagaatgaagaggtctgatttggccagcgccggcaaagctcacccttaggcgaggtcacaacagaggcaggtccttcctgcccagcctgccggtgtagtcacagccaagggtggcacttgaaaggaaaagggagaaaacttcggagaaatttagattgccccaacgttagatttcagagaaattgactccaaatgcacggattcgttcggaaagggcggctaagtggcaggtggttgcaaccccgcccggtcgggccttcgcagaggttccccaagaccagcccttgcagggcggttttcagcaacctgacaagaggcggccaagacaaatttctgcgggttcgagcacacactctcgggcgttgggccccagagacctctaaaccaagcacaaacaagaagggagtgagagaacccaggctagaacttgcacgggcatcccactgaggaaaagcgaggcctcggtggcaggcatgttttcttccgacgcccgaaaatcgagccgagcgcccgactacatttactgcagaggtttccgcctccagtgagcccggatcccccagcggcctgcccggagctggtctccagtccccgccgtagtccgacgcacggccctctcctggcagcaagctcccagcggccagtctgaagccaattctgttcaggcggccgagggcccttagccaacccaccatgatgtcgcctgggccacctgatgcccgcagcggcgggacacggcccgggcagtgcgcagtggctcctgctaggggcaccgcgtgcgtgcttgtctcccgctgcgccggggacgtccttgggtgacacgggccgctgggcacctcccaagccgaggaaacggacccccttcgcagagtctcgcgcccaccccccaacctcccacctcgtttctcgctgctagggctcccgactcagcccacctctcctggcggtttagttagggatcagagctggagaggctgaacgcaacccgtgccagtacggaacagacgatatgtttgcctgctagctgcttggatgaataattgaaaagttcgctgcagtctgtgcttcgtcaagtcccgggtgccgggagaacaccttcccaacacgcatcagggtgggcgggagcgggcagaggaggcgggacccgagggaggagagtgaacccgagcaggagaagcagcccaggcagccaggcgccctcgatgcgagaggctgggcatttatttttattccaggctttccactgtgtggttatgtcactttctcaaacaaatgtgtatatggagggagatcgatgctgataatgtttagaagattaaaagagcattaatgctggcaacaataacgtaaacgtgtggacccagatttcattgatctggaacttgatccggcgcgtttccagtaagcccgacggcgcgctcttcccagcagagcgctcaccagcgccacggccccgcggttttccagcggtgccgcttcgccagctctgcgcgggttctcccgtctgaccgcagctcctcccccgcgaggccccagcccgccttacttccccgaggttttctcctcctctcgcggggctctctgccctctgcaccccctcccccgacctctgcaccacccgcccctgtgcgcacacaccgctacttgcgcttccggcgatccgcctgggcggctgggtccgcgaagccaatgcgctgaacggtgcccgagtcttcctaactatcctgtgcttggccgttgccactgggccctggtgactaagcccaagtttgaaaatgacgtggctaaagctgcctgctaacggcagagcttaatcagccgcagatcccctcctatcctcatcggttctcgtactaaaaaggctcacgcgcagactttttacgcaggtgcattcgttggacaattaaacgtggccctagtaacaaaagcctgagcttcatccctccgagtagcaggctctgcgctggactggtcgggtctaacagggagaatcttgtgtcctaccttggctgggacaggaagtaagagaagcaaactggggaacccctgccccaccccttcccaccccctggacgtcctgggccgaggcccgggtcactggcccatcgcgggtaaggaggtgtcctgtggaacacctgcattgactggaaaagaaagaactttaaagctcttccttcccgcttgtgggggacaccaccacaccctgccaaccactcccctggccaaatggtggcttgtttttccagaaggagcactaaggtgaattttatggaaaaaaaataaaagatcagggacctaagtgggagtaggatgagaactaattcttctgggttttttttttttttttttgaaattatgaatcccacctgttgaagaaggctgagcttttccaacagcgggtatcaatcgggagggaaagcagtgttttccagccctctccaagaacagtaattaataagaggaaggaaaagagagatgggaaagcaaatcgtgcattgttctgctttgagttgaggcagagggtaggctggtgtttcttcctcatcttcccactagtgttcttccttaaagaagggagctttggtacaccaccttggttcctagtcagaaagtgccctaccggacccttttaaactacaatgagatagctgggtaatcagatatgtaactaaggaggagagcaggtggtttccctttggtctggcggacaactggctccctccccacagcccccacttgaaagactcctaggccctgggaggggcgagtgggcctttagaggatagaatcatagactctctcctactcccatcttagaattccaagattgggcaggattcctggtgaatggtgaggtctgggcaaaggataaactgattaccccagattctctgtccctacaaggcaccagcagctgcttcactctccttttgagccaggtctgccctgaggtaacagtaccctaggccagttttaccatcccaagtgccagacttcagccctgagggaaggagagccagcctctcctgctgtcttcaaaccaaggcttcattttacagtcacccccgatatgagagagagcctccccaccaggttttctggcctttagacacttctcttcaaagaagagaccagaggaacaggactgaaaaactctcaggaagaaagtcctgggctccacactccatggctagtggctggatttggcagaaactgtcttcatgaaaagtggtatcatggagggggatccctggagcaaggaagacctcaagggagaagcagagagatttagtttctgggttcttgccaaaggaagggaaattaggagggaataaatagaaataattgcctgtataaagggccctggggaggagggtgaagacagaggcaccctaggccttaaacttcatctagactccctgggctgtgctgacttctgacccttttagggacctttgtttttgctgacttgggaaaagttgcttcctccagggagacaactcttcttagaggggagagtccataatgaggaagccctctggggtgatttatttatgctgtcaggtatagagctccgtcaggctaactcaccctgtggggccctatcaccccctcttatcacccaggctttttccctaaccaacctctgtgcctttgggggaaaggctttttgatttcccagtctcattcaaggcaatggctgaaaaatgtgcataggtttttctaggggcaggtggggaaaaggtagggacgtggattgtgtgacccagcccatctaatgcctgacatggtgcagatgggcaagacttggaggcaggctgtgggctgtgcagatagagatagcctcacttcgggagcaggattcctagaagctgtggacgtttattatgaaaaactgtcccacacaaattgtcccaaagggcagggaggctctgcattccacctcggcacctctttcaccatttgaggacccattactcttctgtagaaagcagactttgtttgggttggaagcacacctccaatgtaatttaatcagcattggactttggctcttgtaatcaaatatacatatactttctcctgcaagaagaaaaataatttctctgtaactggtattgacttgaagtcatgtaatctctggaaagcatcacatttttaaagggaaaggtaaaattaaggggaaaagaacccgcagtgttagtggtttgctttgtcatactaagaagagccagttaccacttaagaaagggcagaagaagcattcctagagcataaatacttgtgctgctccaattgtagatatttcatttacagttttctctgtgcaatcagccttggagatggttaaggataggaaactaggttgactggctcaccaaattctagaatgtgggctttattacttatgttgcattgacatccttgaaggaacctgtttgacggctcatttttctgccgtatttggagaggccacaggcagcagcagctccttgagttccagcaggatctgggtgggtagcaagcctttccttttaagggtgattggcagccattggcagcttgcttcccactccaccccagtgcccttgagcatgaagctgtgccctactgcgtcctcctggagcaagcttggagtccccaccccccagggtgaggttctgggctttgcccaagttgagtctgctagggaatctgttgtaaacacagatccattgatttgcatttgtcagagagtaaagttaaaccagtgaaaagagaagcccttatccttttatgcagggccagggaaacctttcatattgatcctattgatccaacctttccctttaaggaaaccacatagttaaagaccctcgttcaatagatttacccttcgtgcttgtgatattcctttaagtgttctcatctaggatagctgggcattaagcccacactccaaaccaaacaaaaatgggaaggggggtgggaagagagggggtcaggaggcagaattgtgggaagtgaaattaaatcaaactgaaatgtgtaatgacccagttggggatgtttttctcattcttctaaaatgacatgcagggataaagacaaaatagatgcatttggcatctttttttttatgagaaaagaaaatctgtttatatgcctagagtaaaaatgtctcaggaacatcattttctactgtaaaattatttcaattaagccaccagtttgcttcattaagattggttcacttaaaagcagtgatgttgccacaattattttggttcatttgtagcaaatcagaaaaaggattctccccagaaatgcaatattttggactctgtatatgagcataaacactgaagtcacttgaaaagagagaggatttggagtttttgtgttctgctggatgtgggaagcaacgggtagaacttttgttgtggagcagagtagacgcaataggaattgccagatattgctcagtatccctcttgcttgtagatatgaaaatgtaagtctcatttgcctccagaaccatcggcacaatccatttcatttcttccctgatccttttttcctgtctaaataacatccatttgtgatttttttcaacacggtacatgacctgtttctaattggctatctcttgggttgtttttgtacattcatgtttgttttatgtgattgaaaaatattaatgatttcgtaggtgagctaatgtatttatctgctgagcgagttcaaagggcagagttcagctatggttcaggttaattgaacaggaagcagtgagctctccaggctgtgttgaacaagggatcagtcccttaaaatatcacactcagcaaacacaatttcactgtcttcatcctagagtctgatgtaaaaggctcagatcaacttggatcacttgtttaaaaaaccaaagcaaagcacagtaactgcagcaataccctggagtccccctcggggaagaagagttttctcattggctaattgctttattggtagcactgacctgcagagcagctgcaggagcctggatgaaggcttaggcctcagaataatgtgctccattagaacagggcaaggcattttttgtttactcaattggagctccctgcaaagtgccattaaccccggcccaactgcttgtgtgctgcaaaagccaaaggtcacgccagtcagtctgtaggcatagcagctctgccctggtaggaaggttggggtcgcatcctgctggcactgccctcccaggggctcgggccagccctctgggccctttccagagttttgactaaagcaagcaattgcacaacttgtttacatttcccaactgctgaatcatgttttgatgattaaacagttttgatctgagcaccatcaatcacacacatacagaaaatccccccactgcccctctattttctatttatgttctcttcattactgtgcattacagtaaacagaattgtgcaaacggtgcttttagcaggaatatagttctgataagtgcttggatcaaggggaagacagacctccaaacatggctggggggctgtttggtggaagaaaggtttcaagtggagtcggggagcacagtcagggcttccaccgccagcaggtgaactagagtgccacctgccgggagtcttctaactgcactaagccctgcaccttccacaaggtccaagccccttccttcactttgttcctaatatccttgtccccattccccaccctgcagatcactacccatgcaagcattatcttcctagaagtagcttaaagggctttttcctggtcctttgaaactgtaacctctgcctcttctaattcattgccaaggagaaatcaacagttctgctgtcataggtgaggtgatttgcccatcctgcacattgaggtaatagtctcctgcttagttggactgtgcttgggggaagagaagcaaagaaagcaaaaaatagccgtgggagggaaaacgaatgattatgtgtggaagaaaaatggctccgttgattgtgccagtgagggctgtgccaactgtaaggtgttctgcaaagataaaatattgtacaaaggagagaggatgggagagaattagcatctacagggaggacatcgagaaagagatatgccaaatcagcaaactcgagtttaggctttgtgaaatcccctggaaagagaaaaagtgaaccagccgttttgcaattgcaaagaagtgagccagtgagctagacttcgagccagactgtggagctggctgtagctctgtgggtggcagctatttccacacttgcttcacatggacccctgcctggagcccctggtagcagagcgcctgtgggtgggttgctgcctccacgccccggcgcaggcttcagcaccacgaacagcgccatggaggaacgctgtttgagcgaattggagatggaccctctactgcggttaaatccaggcaagagcctgaccagtatctccagctctgtaggtctcagcgccccagtgcagggcctcatattttcctctggagccctgtggcttttcagctctctgtgtgagatcagcgataataaagggaagaggaggcggcatctgggtgagaagacaaaagatgctgaaagactttccctctgaagaggaagagcattaccaccgctggggggcgggggattgaactatttttctccatgttgctgccttctgcaggcatgattgccaccctcaacgggatgttttagatttaggatttcctttcaagtgttactgtctgcctgcccccacgccccaccccccaggtatacacaaacggatgcttttgtttccccagatgcatgctcctgatttttgaaagcatgacttttattatattaaacaatattctcacattatagcagcagtaatgtcacaaggagaaccaactgtggagcatcaccaccttcgataaatctagaaactggatttgatttcttgagagtctagtgatgaggctctttttaatgaaaaccttgccactgcttctgtccctgaccccctacgaagggccagagatgttgagtgacttcctccaggccacacagtggagtcatatggcactggccagggtgagaactgacagtaggcactgacccctgactctggcctttttcaatcagttgctttgctttatttctggttttattccagagaaaagagataggagagtccttttggtcaatgattgagcacaactcacatctctttgggtttcgagtaaaatggtccttgacttcccaaagctaattaaaatgtaaaactcttgctttatttcaaataactttagttcagacctaatttattgctaaggtggttctcagggaggtagagcattggaatagacaagtgtgtctcctttaaaagtcaagggtatgataaatgagaattttttttcccctgtgacaatttatcttcaagttccaggtggccctttgtgtaaaaggagggaaaatccatcccaaaacaaaacaaacctggtagagcattcaaatttgatgttgaaaaaaattgtttctgtgtgtctaaatgcccaaaattttgttctaaaaatgagcaggaacatatctgaatcagatataaaaatgggtgttaaatgtattttgtaagctttgactaaagaagtttcttccagctgtgtagtcttcgaatctgtggacgtgcctttctcaggagttgttgggttccactgtcaaaaccttttccagtaaaacatggatttggcaacagtaagtgtagcctttttggcctactttatatgcatcactgcatcttactaaaatgaggcattacactctacaaggacttgtactgaatgcatttcctttgtagtgaactcaatatgcttttgaaaagatattttacagaactgccacataaacaagaccttttctattatctgttttgaccctaaatactgaaaagtgtgtggagtaagataattttatgcttttctgaatcagtgccatagatccccaaacctaaaagatgtaggggaaaaattcgtcttggatgcaattgcctcctaatgtataccagagttcatttctgttcatgttcaagggacaagagtgaattctgtattcactttcaatgactaacccttctcatcctttccttcattcttctgaagaggaagaggtggacttcctgttgaagaccaaatcctctcctgccttctcaggaccccatgcttcctgtatatagatgtccctgcttttgtgaagttttctctgtcctcctaaattgggatctctttggaccatccctccctttgcatttagaacatagataggtatcgcctgctgacttgtcagtgtcagcccattagattaagatccagaagaggaggttagatacagcatacaggaggcagccaataaatatctgtgaataagttaataaatacttttcttttatatgacactgtttctacccattgtatttcccccatattattgtagatggcatctgagtaggaatcatcagccccagcacatcatttaggagaagcatttcacaatgtcaagttctcatcaatgtcattttcctcccaaattacgatattataactatgtattaattttaagggaatctcaaagtaggattgagtcttatccaaatcttcagattatcgccagtggagcaagagatgtgaaatgatcatcactagactctagactaaggacccattttgccaattggctctagttaccccaaagtaaccctccccagtcagtcagttctcctcgttttcctgctcaggcattgtcctcactgtcctgtccatgtctttgcacgttctgttccttctgcctggaattccttatctcatcagtccttctccaggtcctatcattcctagccacctccgatctgcctctgaaatcttcccagctaactttggcccattcctttctgtttctttctgaactcgatttgcaatcattgcaaatgacagaacagccttgttggctctggtcttacactgctctctaggtcttttctgtgtctccctttcttccccatggctctggaggggagatagcatatctttgagctccccatggactgctggtccatggctgaacccacaccaggtattcttttttgagtaagtcatttggtggcctcctgtctatctttacagaagcccctattctcaacgagagaataggttgggtatgtttacttacatctatcattcttttctagcttcttctctcaaaagggggtattcttttcttattttatttttttgatctggagccgtactttgtcacccaggctggagtgcagtggtgcgatctcggctaactgcaacatccgtctccagggttcaattgattatcctgcctctgcctcctgagtagctgggattacaggcacctgtcactatgcctggctaatttgtgtatttttagtagagatggggtttcaccatgctggccaggctggtctcaaactcctgaccttaagtgatccacctgccttggcttcctaaagtattgggattacaggcgtgagccactgcacccaacctgaaaaaggggtattgttttctataaatgctttggtcattgttggaaatattggctacataatttaaaatggatttctatgttaatctgaaatgagacataagcttaatatagagaaacagggcttgtgatgtcttcgttaatagcaaaggttgttctgcttcatacaagatggaaaattttacccacctcagggcaattgtgccagcaattatatcagcaaatcagagggactgctttcctattttaagtcattttaattatcagtaaactaaacttgcatctaaacagccattacttgagatactgcaagtgcttaggttgttaataacgtaaagttacctgtgaagaaaaaaaacagaggttaatatttttatctttttattttattttaattttatattttattattttcctttgatgaatccattgctgcctacactgtactgaactaagtagttgggagtgaaaatatatgaactagcccttgtccctttttgactttactgtatatttaagatttgaatggatacatcctcacttacctttacatatccatatggaattgagtgagaacagagtttattactatgtcaactttagttggaaactgaaactaagatcatttatttgctatacatcttacgtggaaattatatattagctcgtgatatttcatcttttttacagttatgttttgacgttcatattacatgagtaacaaattatgaagactaaccatttatgaacagaatttagtgttaaatgaaagcattccagatttttattttctgttgccttgaattgaatgcattgctgtgctgcatgataactaggtaagcaattgacctgtgtgactgtcatttctgtgccttgcataaccaaaccaagtttcctctgacactgaggcagagacaggcagggttgcgctgggcaggaagcagctctgaggcctccctgaagggccttagactcccaatgggggagtcagaggccaccctgttctctggctacggcaccatagcctagacatgggtgtcaccaaaggctatacacttctttacctccttttctgccctcttcctaaaggaagcatctggaaccagaaggagtccatatcgctagccccactcctccctaaccagttctccatcccgagccttagattcaggcttgcataggcagattctggaaagtccattaaaagggcaggatgtggagtaaataggtgattggattggagggtaaagggcggaaaattcacagcagagacaggtggacttttctaactggataagctacaccaactcatgaatccaagtattccacccctggaaagcaagaggtgaaagcaagttggttccattggtgaaagcaagtcacctgcctgagcccagagacagggtggaaaggctctacaaagttacatggcaggaagcatgggcacagaaaaggcaagcatgaggaatggggggggcggtgttggtgtttttctttgtttgtttgttttgttttgtttgcattctacctcatgccatgtattttagctcatttattcttggaagctgccactgctatggtgatacacagacatcaaggatgtccaatagtatagggctaattttggcaacacagaagataagtgtgggggtatttcacattcataagtaacaaacctatgcccacctggacaggaaccacgcctctttgtattgagactgtttgtgacatgcttgatcttctcgactagatcatagcaagcagggaccctgagctttgttctcctgcatcttccctttagccccaccacaatgcctaacacatagtttgcacttagtaaatatgcaaggataaatgatccccagaatcccactgctctagtgtcccaatgggagatcccctcaagacccaccaggtgattgcttgtagctcaacctgtattttattttattttattttattttattttagagacagagtctcactctgtaacacaggctggagtgcagtagtacaatcttggctcactgcaacctccacctactgggttcaagctactctcctgcctcagcctcccaagtaggtgggattacaggtgcccaccactatgcccagctaattttcatatttttagtagagatggggttttgccatgttggccaggctggtctcgaactcctgacctcaggtgatccactcaccttggcctcccaaagtgctgggattacaggcgtgcgccaccacgcctggcctcaacctgtattgtaaaatagggtttcactttaaacttttaaattttgttctactacaataattaccaaattccaggggagcaaaggtccaagcctgttgcctacagaattaaggcatccaattcagatctcaattattttgtgttaagaaaatctaaacaaagcaaacactgcttagggtttaccaatgaataaagaagcaagttggaagggatatcaaaaagatcaaaatgtttgcgcatttataactttaacaatgtctaagtttttttaaacttaggttctacatctggagcatacttttttaaaaatcataagcagtgttaaaaaatacttgacagttttgtcttgattcttaatgtgggtgttaagggatgccgtccattagtgagtacaccccagatcatgtgtttattgcatcctccttcttccctgcctgtcccctaatgatctggtgcacagagggctacttgagctgagttatatggatctcagttgctgtcatttgcacatacttaattcagagaggtgatcacattgatttccaagacccaatttttaagacactgtactcacgtagatatcttagctgctctgactatgttgtctgaaaaggaaaacattttaagcctttggaagcaattttgatggacatttcattgtgttctatattactcacataattaaatttccttcaagtcaaagtctgtttaaaattaaattgagaaatatttttgagttccatcaggcagataactttgtttagctagatttgttctgcattcacatgaaatggcgtcctacgaatcaatacccagtgctcacagttcccctgaatgtgaagaaatggcacccttagtagttcttgtgtttttatgcctatggttttgcaggctggtttattcagattctgagcattgtgaactaaattcataacttctttcatgcattagccggagtcataggactctgatttacagactcgcagtccagctcacagcggctagctttctttgggtcataccagagtttcatctgcatggccaaaggggtagaattccaacttgggtttgaaagcaaataggataaattgtcagaagatgtattcctgtgtacatctttggaaacaagacataggaacaaacccttatttttcaactccacccaccctgctactgaggacagaagaacaagccctcctcatcttttatcctgcctctccttgagacagccattccattaaattctatggcgagggaatctatggtgttcgagctgtaattgaagaattagcattccataaatgctgccttaatttttttaaaaaaattgttccaaagaactgctttttgttgcattgttaattagcctttgaacatttttgaattcattataaccttcaaggtctgccaaggtctttaaggtttcttctttatggctttgcctctaaataacaataggtacattgtaaggttattgtgagccttaagtaagttaatgcatacagatgcttagaataactggtaaatagtaaatacttgctaaaatatctgccattattgattgattgattaattttttgtaacttctccatatatcagcaggaaatttggcctgagtcaccaatgttcccatagcttttatatattaagaatattgcttggcattgtcaatgacagcatgagccaaacagatccagtttgtatctgagccaccatttactagctctgtgatgtcaggcaggggacgactcttgaagagcctcagttccctcctctgtaggaggaggacaaggtaggtcctgacgttatctagttggtgtacagattaaatgagacgccataagggtatatggcacctggtacattgcctcctatctcctcagttttacagctaacatcctattacacatgggccacatctgtacttcaacataaattttttgtcattttctcagatgagatttaggatgagtgagattgccagactctacactcatcactgggcatgctgtttgcaaactggccaaccatgcagccggactatttactccccacccccaatgtccttttaagactcccttaacagttatggacattttgctaagctcgtgcttagaacccagaagttgactgtgcacacagtaggttctgactgaatccctacaggcttagattggaatacagtccattttgcaagtgtggtatgtattgagcagacattctgtatttgatggaagttcacatataaaaatggcaactgagccaacaaaactcacatcatctgtctctataatgatcacaggtttggggggccttatcagaaagttatttttatagacaccccggtggtcatgagatttaaaatgctaaggagaatggcttcctctttaacctcttttctgtttttgatatgtctgggccctgcttctttatcttgttccccaaatccattcacttaggttctgacttggctccctggagagctcctgttttggttcacaccatcatctttattcccaaattaggatccttaacaagaaaagagaaaagaaagaaaacctgtagacatccagatgttgctttttctgaagtaacaactttatttgataatattttgaagccatgggccaccgaattctcaacatgcaagtttatttaaacagtctctagtatcctttcctgaccccaaattactttcaagcattaattgtcctagtggtttcatggccatattatttcatattcattagtgttttcatgaaaaattataacactaattagagtggcttccagttaattcacttggtgattcattactctctccttcttggtgatctgcatgtggtcatcctggagaaagcatccaagggtaattgcagctctattccctgagtgattgcctaatgccattagttctgatccacaggagcatctcgggaagctctgatggggtctggttacagctgcacccttgtcctgccctttggatgcagggagaaagggaagcctgcagtgaggactggtcctccggaggggtctagggaaacagaggggagggacgtcttagggaaaaggaagtaggggcaggggagggagttcagggatttgaacatcactttaacatcttctagaacttgggtaaggacagtatagagtaaaatctgccctgagaacttgcacgtagagtaaggaaggtggtttctcttcagtttcagcagacttgtggccaggcactgagctggagtttggaaacccggttccctctcagagctctgacatccagttcttccaactgaaagtttatttgacctcattcccattaggatggctgctgtaaagcaaaatgaaaacaaaaaataacaaatgttggcaaggatgtggaaaaattggaaccttgtgtgctgttggtgggactgtaagatggtgtagccactgtggaaatagtatggcagttcctcagaaatttaaaatgtgagttatcacatgacccagaaataccacttctgagtatacactccaaaagaactgaaagcagggtctgaaagagatatttgtacacccgtgttcactgcagtgttattcacaacagccaaaaggtggaagcaacccaacagttcatcaagaggtgaatggataaacaaaatatggagttttcatacagtggaatattatttagccttaaaaaggaaggaaaatctgacatatactatggtctgaatgagtcttgaggatattaagctaagctaagtgaaataagccaatcaccaaaagacaaatactatatgatttcacttatatgaagtgtctagaatagtcaaactcatagaaacggaaagtacaatggtgcttgccaggtgcctgagagagggaaatggaaacttgtttaatgagtatagagttttagttctgcaagatataaaagttctggagattgtacaagaatgtgaatatacttaacactatggagctataaccttaaaagtagttaagatggtaaattttgttgtgtatattttaccataatttcaaagaaagattgtttgttatttatattgtattgcttgctcaatttttaaaaaaaattaaaaatagaaaaacaaaaagccaggtgcggtggcatgtacctgcagtcccagctactggggaagctgaggtgggaggattgcttgagcctgagttctggactgtagtgccccaggcccatcaatgtcctcactaagttcaccatcaatacggtgacttcctgggagtggggtatcaccaggttggtgagggaaaaaacaactactgccatgttgctttcagttcttttggagtatatactcataagtggtatttctgggtcatgtgataattcacactttaaatttccgaggaactgccatactatttccatagtggctacatcatcttacagtcccaccaacagcacacaaggttccaatttttccacatccttgccaacatttgttattttttgttttcattttgttttgacagcagccatcctaatgggaatgaggtcaaataaactttcaactggaagaactggatgtcagagctctgagggggaaccaggtttccaaactccagctcagtgcctggccacaagtctgctgaaactgaagagaaaccaccttccctactctatgtgcaagttctcaaggcagattttactctatcctgcccttaccccaggttctagaagatgttaaagtgatgttcaaattcctgaactccctcccctgcccctacttccttttctctaagacgtccctcccctctgcttccctagacccctccggaggaccagtgctcactgcaggcttccctttctctctgcatccaaaggtcagttgtgtttgctcagtagtgggatactgcctgtgaatagccactgtactccagcagcttaaaactccatttcttaaaaacattttttatcaaaagttctgccactccactattcacaatagcaaagacttggaaccaacccaaatgtccatcagtgatagactggattaagaaaatgtgacacatatacaccatggaatactatgcagccataaaaaaggatgagttcatgtcctttgcagtgacatggatgaagctgaaaaccatcattctcagccaactatcgcaaggacagaaaagcaaacgctgcatgctctcactcgtaggtgggagttgaacaatgagaatacatggacacagggcggggaacatcacacactggggcctgttgtggggtagggggctgggggagggatagcattagaagaaatacctaatgtaaaagacgagttgatgggtgcagcaaaccaacatggcacatgtatacgtatgcaacaaacctgcacgttgtgcacatgtaccctagaatttaaagtataataataaaaaaaagttctgccactcaaagagaaccacattaatattttgcttttattaaaattatttttaattatttaagcaatgcattaaaacattctacttataaaaatcaaaacattaatgatcagaataaagtcctctttgcctatctcctttaataccagtcttcttcattacttcccagcagtaaccactcttctggctacaaagagtgggtctgccaatccaggcacttccagtgcatttatttacctacatatgtactcatataaattgtataaataggtagaaagacagatagatagatcgataggtatcttaggtttgcgtattgttttcacataagtggcatcacactgcatgcatcattccaaagctccttctttcctttgatagtatgcctacccagcttctacatataaatgaggttcttgcaacccacatttattgcatagtgtcctatggcatgactattttcatttatttagccatttctgttttgatgggcaattaggctgtttaccatttttggttgtttgcattatttgctaagcagtgatgagtgaacatccttgtacacacctccctgtgtacccatgggaatgtttcctagggtggacaccgagaagcaaaatgagaggtcatggagatgcacatactgtaattttgataggcactaccacactgtcttcgaaattggctccccatcagcagtggaggagagagctcctatttccctgacacttgccagaagttaatatattagccattttacttttttttgcatagttgctggatttaaaaataacattttgtggttgctttattttgttatatttttatgatttctaatgaaccttgatataatcatatacttgctggtcatatatatttccttttctgagaatgtcctgttcatatccttgtttggcattgttttttatatattctggatgcaaatttttgctttacaaattacaaatgtggtctcagttctccagttaaaaggcataaagtgattgaatggttaaagaaacaagacccatctatatgttgccttcaggaaacccacttcacccataaagacacacatcgactgaaagtgaaagagtagaaaaaatatttcatgcaattggaaaccaaagaagagtgggagtaactatacttatatcagataaaatagactacaaatcaaagactgtgaacaaagatgaggagggtcactacgtaatgagaaaagggtcaatacagcaaggggatataacaattataaatatctatgtgcccaacactagagctcccaggtatataaagcaaacattaatagatctaaagggagggatagactataatatattgaaaacattttatcccatggtattattttgaaacttaataaggcttcttttaactttgatgtatcaaattcatcttttttattatttattttttatgagacagagtttcactcttgtcgcccaggctgagtccaatggtggtgcaatcttggctcactgcaacctctgcctctgggttcaagcaattctcctgcctcagcctcctgagtagctgggattacaggtgctctccaccatgcctgcctaatttttgtatttttagtagagatggagtttctccatgttggtcaggctggtctcgaacttctgacctcagatgatccacccgcctcagcctcccaaagtgctgggattataggcgtgagccaccatgcccggcccaaataaatatttttgttgctcttcctttactttatgtgttttgcttcttgggtcatttttatttattttatttattttttagaggcaggatctcactctgttgcctaggctgagatgcagagccccaatcatagctcactgcaacctcgaactcttgggctcaagcgatcctcctacaaaagcttcccaagcagctaggactacaggtgcctgccacctcatccagctaattttattttatttttttcatacagatggagtcttgctatgttacccaggctagtctcaaactcctgagctcaagcaatccccccacctcagcctgtgtgctggggttataggcgtgagccaccatgcctggccttgggtcatttttaaacatttgaatctttattctttaatttttctgaagttgctttttataaattatgtgaaattggaatctatttttttaaaatctcaaatggatagccaactaatccaacagtttctgaacaattcatctcttctcactatttgaaatgcaatactttctttataatatattatattcccttatgtacttgggtcagtttctgcactccattctgttccatggatctattaaattctgtgtcaacgtcatactatttaaattatttttgctttatgatatatcttgagctctaataggatatatattttctctcctcatcttctgtttctacatcttcttagccttccttgtattttcacttttccataggaattatagaatcagcttgaatttatatattattttgatcttctcaattatacatagggcacagagttctattcattcaaatcttttttttttttttttttttgagatggggtctcactctgttgctcaggcctgagtgcagtggcacaatcacagctcactgcagccttgacctccctagctcgggtgatcctcctacctcagcctcctgaataactgggactacaggcacacccaccacacctggctaatttttttgtattttttgtagagacagggtgtcactctcttgcccaggctggtctcaaatgcctgagttcaagtgatcctcccacctcagcctccctggcattatggcgtgagccaccacgcctggaccccaaatctttatttatgtcctcagcaagtaaaaataagttttagttttggccttttgatcttttggttagagttatttctagctacttgttactgttgtgaaggtttttttctgttgcgttttggtttcatagttctttatactcaagtatcctaaccactatagtttagtgttgctgttttttttttaacttcatataaacagactcactatatgtgtattcctttgtgtctgatttcttttttccaacattatcttcatgctgttatgtgttgctgcatgtagtagcagtcattccttctttttcataactctataatattccactaaactcatatgccacagttaatcaattctcctgtcaatgagcatttggattgtttccagttttactacagagctgctctgaacattcttgtacatgtacatgcatcctaatgtacttaaccatacatttctgtggggttttcttaatttgagtttcttcagaagcaaaccctaaaacaagaattcaagtatgggtagtttatttgaaaggtgattccagaaaacactagtaaaagagtggagaagcaagacaggaaagggaagaagcccaataagagtcacttcatgaagcacattagtagagtgggcaaatggagcttaatcctgctgagtaactctgtgaaactccagagaaaatatgccttagagttgttccagctgaagaacaagggtgctggggtatttatctggcagctccaattattccctaattgaggaaatctcctggacccttccccagcccttctggcctgcactgcatgtgggcagggcaggctctggcagccagacaaagccctcaggcaaagagctgaaggtactggcagttagaagttgggctgtcgtgccccgcagtggtgaaggccaggagagtgtggcagcacatgacagagtctgctacaagagagtctttccatgagcagaatttctgggtcatagggcacatatatattcaaccattgcagatactgccaaacagtcttccaatctgttgtcccagtttgccctcccaccagcagcctaggagaactcccgcaaggctgtgtccttgccagctcttggtattgacttttacatttaagccattttgataggtgtttaatgttgtctaatttgcaattcctggattactgataattttgagcatcttttcatgtaatttttgaaaatttggatttcttctgtgaagtgcctgttcaagtctcttgcctgtttttctattggaatgtttggcatttccttattgatttccagaagattttatatattctggattcaggccctgtggcagacatatgtgtttaagatatctgtggctctcctttttactgtcattcctgtcttttgaaaaacagaagttcttaaatttttttaagagacagggtctcgctctgttacccaggctggagtatagtggtacgatcatagctcactgcagctttcacctcctgggctcaggcagtcctcctgcctcaaccttccaagtagctgggactactataggcatgcaccaccacgctggctaacttcttaaaattgttttttgtagagacagggtctcactttgttgcacaggagaagttcttaattttaacgggccccaatatataactatttctctttgggctagtactttttgagtactaagaaatctttcctgtgattatgaagaattaccctatgttattttctttctttttttttttttttttttttttttgagacagagttttgctcttgttgcccaggctggagtgcaatggcccaatctcggctcactggaacctctgcctcccaggttcaagcgattctcctgcctcagccttccgagtagctgggacaacaggcatctgccaccacgcctggctaatttttgtatttttagtagacacggagttttaccatgttggccaggctggtctcgaactcctgacctcaagtgatctgcccgcctcggcctcccaaagtactgggattacaggcataagccactgtgctcggcctaccctatgttattttctaaaaactttattgttttgccatccatactaaggtctgtaatccatgcagaacttattttttgtgtatgacatgaggtaggggtcaagaattacattgtgacacaatgcctatccagttattccaactccattacaggagagaacacatgttcctcatgttctgcatatccaaccttgtcattgaatccagtgtccatatgtgtatggatctatttctgggtttctgtccttttccactggtctggagttgtatgtccttgctgcagtattacaccatctattgtagcctcattaaagatcttggtagttgaaacagaaagttgtcctacgttgttcttcttcatctagaatagcttaactgttcttcgatttttttgcattcccagttaaatttcagagtcagcttgtcaaactcaaactttctttcctttcctcttgaaaggaaggaaagaaggaaggaagagagggagagaaatctgctgggattctgattagagattgcattgtacctgtagatcaatatggaaagaattaaaactcttcacaatattgagttttccaatcaatttatttaggtattctttaatttctctaacaaagttttgtagttttccctgtcaatgtcttgtatacctattgctagatctattctatgtacactcttgatgttttgatcctattgtaaatgatatcattttcatttactgtttgatgtgttatggagaaatacaattgattttgtctactgacttgagtcttagaatcttactaaattctcatactaattctaacagttcattgtgtattctcgtggatttttaagtacacacaatcaatattgattttctatgttcatcttgaaactggccaccttactgaacttttttattagttctagtaatttgcctttcaaaatcttgagttttctaggttacaaaaccaaaaaaaaaaaaaagtccctcatattaacttataattatgaggattctgtttctggctgaagacgctgttaagtaaaagaagtatggagtcacactacctgaatttgactcccagcctgttatttactatgtaactttaagtaatttgcttaatcctctgtaccttggtatcattaattataagctgcctcatagggtggttgtaataattaaatgagtttatacacgtagaattctgcctgtcaaataatgagcactcaacttatgtaagcttttgccatttcatcagtttcctaaattcctttataaattttctttctaaattttcacttcttatttattttttcttattttattgtattggctccttttccgatataacattgaatcatagtggtgcttacacccctcatctgaaatttcaacactttgaaacatttctttctagtattttttttgttttttgtttttttgtttttgtttttgtttttttatataggcatgttgttttgttttgcttttcatgtttgacgtatctgaaattgtctttgactggacttccaaatctggtggtaaactatgcaagacagagatacttttccaaaggaatgtcttttgttcaaactatattattcacataaagatgaaaagtaataacgaaacaatttgtttttaaacattgagatttggttgtgaatggagacaccgaccctttttccttcctgcagattcattagtgtagtcttaacaaagaggtgctcttcattcatgtaataaaactttttaggatgtttggaaggagctcagggatattcgtagccacatagggctgttggccaattcttttttaagacaatatcacattcttgagcttttaagtttgattaaattcttagtaagctagagtatgtcttcaagttattttcatagaaaatattttcatagaaaattttcatagaagttattttcatagaaagcctatagttagaatttttgagtcattaaataactaagaatgcctttctacgggaaagaccacctgaaccacataaaattctagcattaccgccacagtgtcagttttgctcttaatttcctccaatgccactactgtatttctcattttcctgcaaattttaaaaatcttactcctctttttttgcggggggcgggggttgtttgtttgttttgagacagggtttcattctgtcacccaggctggagtgcagtggcatgattgtggctcaccacagtctcaaccctctgggctcaattgttctccctgcttcagtctcctgagtagctgggaccacaggtgcacaccacccacgcctggctaatttttgtagtttttgtagagacagggtttcgccatgttgcccaggctggtcgcaaattcctgggcttaagcaatccgcccgccttggcctcccaaagtgctgggattacaggcatgagccacctcatccagcccatcttttgtcttactactttttcattacatatggttacttacaaattgctattttcttcttaataattttctgttcctgtttcataaaagccacctctttttgcatcatattgttatatcaaatgattctctaaaatgttctttaagtttctggaagatattatctggtaaattttctctggttttcagatgaggatccctttttgtcttctactattttttcaattgtctctttttcctgtttattcattctcaaatgagaagagacccattctggcttgccatggtcaatagaaagggtgtatgttttgctcatgacctcttttctggatgttagtgcactcattctctaagccctatactaaatcgccagttgatacacctaaccaagcttccatctaatcagcttccttgttgtgtggccctgctgaactgatgtgcactcatctcctgcatccgatcctgggatgctgagaagctgatcaaatggaatacacacgacaacccccggtatactgcacatcgagggctcctcttgtacctgtgctcaccctgagtgctctggaaactacttctccaagggagtgatgtaccagccttggtgtccctcctccaccctgcagttttgttttgttttgttttgtttttttgcctagttgttttctgagagttgcagttcttaattggcaggtggaagggagtggggagtactctggctctttcaaaaggcagcacctaccaagtagatggatggctgctgaatttaaatttctcaacagttggaggactcagatgttattttttcaatcctgatgtcccatttcaacccagttccattggccttggccttgtgtttaggtaaaaaatctccagatcccccaaaacagactgactgcagtcctggtttttggtgtgctaagttttgtgtttcattacaggacttcgagatgattttagcagaaagttgaagaagctgccccatgctctcctagccattttaagccagatgtttgtatctggaattaaatatttgttttagcaactcacgacttcctggatggcttacaggaatgcagcttggcagcagagctaaagatccctctttgccaggcttctgcataggcagaagagatgactgggaattgtgatttcaaaggctgagtgccccaaactatttattctaataggaaggtgggaaataaaagccccactggactagacaggagggaatatgggttctcagggctgtgtcactgcataggtgaccctagctgggagttctgatctcttatttctaaaaacaaggttagaccaagtgctctctaaaatcctgcctttctaggagtctgtggttttagcagctgacctagaccatctgctattagaagcctgttctttgaggctactcatgtttgttagagcctctgctggagagaagcagaagtaagaggtacatctccactcggtgtacaggctccagtgtgcttcctacaggcagcacctgcgggcagctacaggggcctgaaccttcccctgggagatctgcccaccaggggcactctgggcctttttcaggccatgcctccatataagaaagtcgtgagacatccaagagccctcatttcctgagtccccttcagtgactttgtattgaaagtaaaaatagagacaggaaataaaacttgtttttttcagagaatgtctttgaagcttgggaacacagaatggtcgctgtgcggtctgcctccagccgacagtaagtggacactggggagttgctctagcgcttgtcaagaccagcttcgacatccaagtgaaagcagaggcggcggtgtggagaaagagcagagatttgccattgatcatccacatttcctttggttttttttttgtttgtttgtttgtttgttttttttcctaagacagagccttgctctgtcacccaggcgggagcgcaatggcgtgatcttggctcactgcaatctctgcctcccgggttgaagtgattctcctgcctcggcctcccgagtatctgggattacaggcacacgccaccacacttggctaattttttttatttttagtagagacagggtttcaccatgttatccaggatagcctcgatctcctgacctcgtgatccacccgcctcagcctcccgaagtgctgggattacaggcatgagccacctcacctggcctatcatccacattttctagatgagaggaagaatgtactacaggaaatctccccaggatctgagatttgtcctgtgtcagaggtgaagcccaagacacggctcacaccgacattccagggcagtgccaagccttcccggactccgggcagctcggaacttggggactttgcccccaccctccagcatctccagaatgaggggagtgtgtatgtgtgcatcgtgcatggcccctcctgccttcttgttccttctccctcctgtctcctttttcctcttgctccgccattctcccgcccacaatatctgctctaataagccaggcggcagtgctccaactagcccataggtggttcacgctggagtaccttgtgcaggataatttgccaaatgggttagaggtctgtcttgcaaggcctgtgcatacatccacaattagaagggagtgaaaggaggaggggaacctaacaaccaagaatggctccacatccatttgcacagtgtccaccctgtctctgcccttggcctcccaaatggatgttggtctggacgtcactggctccgctgcctgtctgtattggcatctggtacatgaagaccaagtttctgaggaaagccagctctcaaccttgaaacaaagccattaagtttctcatctgactcagatcaggcacgtttggagaaatgagggccaagttagagtttagttctagaggtggttgggggcggagggcaggttcatggtactggctccatggtcatctgaacctaagtggcctttggtgatgcgtcagaaatcacaatgaagcaaggaaacctgcaaggcatctaactgggaactatttatagtttccaaaatttagggagcacaaaataatccaataatgattttaagacagaccctccccatccatcaaggcctggctcctcccaggtgggtgatcagtgcttctggcaccagctggccctgaatggccagtggagctgcttagagcctgagccccaagtcttgtgtgttaggccccctgctcccagggtctctgtggcaatgtgctggcacctaattatttgctgaccctgagaagcatgcattgctgagatttaccagcatttatggcttactgaatatcaaatatttattagcagagtgtacagttattctattttctttcttccttgtttgaattcaaggaatcttattatttttactttaaaggctcttgatcatgcagattagttccaaaggaagggttctctactggacaccatcacctctcccatagtcttgtcattctatcagtactgaagggccaccagttcagagcagggaagtgaaggggggttatttccattcttcttacctcaaacacctgtaggtttctcagggaacaagcccagaggtacaaatgtgaacctacttttgtaattgatttttccaacataaccccaattgactgccttagttaatctttccaacagaactgcaggccctatgtcctcccgggagagtgccctccttagtggaaagggtcacgctccccactttgcacaagccttcctaggagggaagctgcgagctcttcagctgaaaagcgaaaaggcctcttctgcaggtgtacttttcaaacctgtatccttggaggttaagtgtctgctgacaaatgcacaccctggatggtctctctccccactccccacccttgccctgacaagatcacattgaactattcagggaaagtatttactgaatgcaaggagaatagagcacttctgcattatttattaggggctaacaatacccatcatatgtagatgatattgatacccatcaatgtatttggacataaattagtatgttaggaaactccagtggtccaaaaccttttaggatctctgacacgtatgtaaaaacacgtcgtagtcttacctcttatatgaggctgggaattggctatgagacaacctcacaaagaaaacaaacatctttaaccttttatttgccattagccctctgggcagttcatctactatcgagtaagacttgaaatcatgaactcttaacctctccttacacaccttctttctgctttctctaaggaaggaagaatgttcacatttcctgagtgtctactctgtgccaagtgttacagcaagccttttgatgtcctggagtgctggacattagcatccccactctataggatcaggaaactaaggctcacagtcctgcagctgataagtggctgacaaggagtaggaaacagggtcttggcttccatctgagcttcttacagtacatttgactcacccctgggcaggaaggcaaaggtcattcttggcttctgtatcagttacctgtcaccacaataatgctgcaaaacacagaaccacagcatgggtgatataaaacaataaacatctatttttgcccagaagcttgtttgttggctgggtgtgtctgctgatacaggccgtgcttggctgatctcagctggactcaagtgtgcatctttagtcagctgctggatcagctggggctgtcccgtccaagatggccttggccaggacagcccatccaagttgagtggggagttccagttctggggcagcgaggactggaagattctgacccggtgttgagttgctcttacttcacaggcttcccagaaactgtggaggctgggaaggggttttccaagatcaaatccaggatccagtgctaattgagtcaccctaaacaaacgtgtttccttctccaagagtaaaatgggaatccatacctctgccccatcttcctttcagagatgttgtgaaaagaaattcccaatgggggatccagactttggcttccactgggactcacctcactgtgccttcagttccttatgtgaaactgacaaccctggactggacaaaacactgaggttctatggctctgtgaggaggaccaagctaagggagataaaagatgttcaggtgccttgaagagctaacaccactgcacctgcggaactgggtgtcaaggtgacatgcggttccagggtaattccccaacctgtatctgcctccctgaaccaaccagatactgtcccccttaccttaccctccacaccacacacacacaaccacacacacacacacacaaccgaggtcagtctaccctctgttcgggaatgggccctcccccatctctctccttgcttcccctccccaccagcacaaaggccctggcttccaacaccccattactgctcagcatccaaatatccaaagacttttgttactagaaggaaaacgcacgatgcgtgacaagcagcctttctggccggggaagctactctgttactgaccacgcagtcggtggcaaggtccctccccaagctgagagagaagggagagcacaggacaccacggggccttttctgtcctccatgatgttctccagtctcacacaatccctcaccctgtcccgcctccctttgcatcccctctggatgggaatcatccctggcttgatgagcgttgctgcacgactctgaccacatacctttgtgctgcccatgggtaggcgatggacagggccagggccggttagtctgggtgtcagagggcagctgagctcctagaacgcccaggagcagccactctggaggcaaagtagacctggcccacatggagttgggttgggatggggaaggcatggagaaagggtcagttgtggagagacattctctctctccaggttagaggtggggaagatcagctatggggagcagcacattcttggaaaggcactttgtttgtcctgtgtctgacctcctgaggggcaaaaatccagtggccaccagggagaagcaagttggtgtctgaagatctcagagagggcttgtgcccgaggccagggcttcccttgttttaccctgggaacccagtgttttgaaaaatttatctaccaaggaacctatatttttaggcagtagctgtctgccatccttgttaatcacagattatacacagatgtgtacatgcctgccagtaccaggtcctgggccacaggacacaaccagcatgaccaatctgagtcaatattatttctttcaaaaagtggggaaaggtagccttattgtaggtaaacaaatgacttctcttcgagtctttgaaatggaagcgagcgcttggccttccatgtggtcctacataggacctgcttccctgtgagagggagggagctcaagaatgtctgagggcttttgggatctacacccacctccccatcaggcagtgacacatcagctcctggcatgccctccctgctttcctcctaaaagagagaggagaagaatcagatccaaatggtctagacagggctgggctaaccttgcaccttccgtggcagaactggctttgagcagttggagttcaggagaccctgaccagcatgtgactgtgtcaagactgaatccatcaatgccactggaacacctgctgtttcgttgggtttctatcgcatccttgggttggagggagctattgacactttcctggctgttcaaaaatgggcacatgtggactatagagtgtagtaattgaacagcaccaaagccgtttgcactctgcttgtgcctgcaggcacacctggctccacagcccgggtctgaggatgctgaggtcacagcctcacaccagctcccagacgtcattggatctgtctcctttttcttaggctttcaaggcaggtgttctccctcctgtttttattttcctttagctcctgaccaactgcttttgtcaaaatcaacagctggcaattgctagctataaaaaccctgggcaacatatggacatactgcctcattatttagggcatttgggcttgctgtacacttctagactgcaagctacagctttgcatttgttgctgtggcatctggtggcttccaaaggctgttgggaaggcataggcaggatgtattgatctgttctctctgtgcagtttgcttcacgttaagtctttaatatttttatcttaaatatgtgtgtgtatatatatatataattttaaatatatgtatctcacacaaaatataatccgacaagccaatgtggacctgtacccaaactgtctaatcaccctattaaaagcacaaatacagcattatctgaagaataatcaatattggtatgaaaattgagagctatgtggttaatccaaaggagcgtgaattgacagaggacctcagccaatgtttgcagaagatatttgcctggattttgttatcaggagattatcatgcatcactatttattcagaatcctccagatgaaggcttgacaccagttgtcccaggggtagggtcagggacggttgtccagggacctgaagtggcagtaggggcaagcatagtggtttctacatcttaaaaggggctgcagaggtttatagaagcacagattccagaaccttgccccacatggtgaaaatcagaatttctgggggtggagacccagaggctgccctgcaaagagggcccctctgatgtgcagttgggtatgggtgccattccctacaagagaagtgtttattctttctttccctgggtctgcagcaaacctgggatgcggtgtcagtgtcatcacatatactccaaggtctccatgtatttccttttaaaatgaaaatcatttttcctgatttgcctagctcagagttactggggtaatacaatgagaaggagagtatgaagtgaagaggtacctgttatctcacttaagcctctctagaattgaacatttttatttccttatttagatgaggaagacaggcacaaagaggctacgtaatttgcaaggccccaggtcttggaggtgtggaagcccaggtttgaatccagagctttccattgcataacatgctcctctgagactgtagaaatcaggcagacccttgcaactcaaaccgaggcatgtggaccagcagcatcagcatcacctgggtgctcatgagaaatgcagaatcccaggccctgtccaggctgaactgcatgagaatctgcgttttgatgagccctccaggtgattcctatgcaccttaaagtttagcagcactgctgtagaggacttcagattgagcaagagagagtagacctcaaaacaaggttcccctgcaaaggctatttctgtgtgttaccaccacacaggaatcatcagaatccaacaaaaatatgcagtcttcacaggaatgagcaaagaagaaatcattaccggtaagctgttggaaggatggcagtgagcagtcttagccctttctgtctgagttcccactgcaggggaagcgctcctcatccaagaaagccaaaaggccccaaaagaatgagttttaagatgaaaacaaattgtttttatgtggatgtgttgtgtgtgtttaattttgaagacaatatgaatacttttagaaatgagagaaggaaaaatcaggaagaaagtttagccaagctgatacagcctagcagctttcccattcaggggctctcctcttcctgccctttgagagtatcagtgcattttgattatttcaggaatgattcatttatattactttatagcacacagcatccagcagggagggcagccagttaggtagaaggaaattcagcttccaagtatctttcccgtaagtgtttgtcttcaggttaaatcctgtcttagtctgttaaggctccagtaacaaccacaacaacaaaataccgtgacttagtgcttataaacaatagaagtttatttctgacagttctggaggctgggaagtctaagattaaggtgccagcggattcagcgtcaggcgatagtctgtgtcctggttcacagagaagactttctcactgtgtcctcccgtggtagaaggggcaagaggtctctctcaggcttattttataagggcactaaccctattcctgagggctccaactttatggcccaatcacctcccaaaggccccacctcttagtaccatcaccttggatgttaggattgtaacatatgaatttttggggggacataaacattcagacaccgtagcagaccgtccacataagatgctgcctgcagaacacattgaacaggaaatgcagtgcccgaaggccaggaaacaaaatatacaagccagtgctttgagaaacataggaaagcatctgagcagcaccctgggtgccagtcttgggggaatgtcagtccactgcaaagggattctcaacctctggccagaatatccagtaggatggattctgagggcgactgccccatctgggcctctgctccttcctggcctttccccagtttttcctgttgaggccacactgtcaccacacccctaggggagctgggacttatttcaagtgattttttttttttttttttgagatggactctcaccctgtcacccaggctggagtgcaatggcatgatctcgactcactgcaacttccacctcctgggttcaagcgattctcctgcctcagcatcccgagtagctgggattacaggtgcccaccaccatgcccagctatttttttgtatctttagtaaagacagggtttcaccatgttggccaggctggtctcaaactcctgacctcatgatacacctgccttggcctcccaaagtgctgggattacaggtgtgagccactgcacctggccatttcaagtgattataacacacgttctcatgttttagcattatgatttgtaatactgtatttaacctttacaggtcacttttctgagacaccgaacctgtctgtgaagtgtacagattccctgaaagcgtcaagaagccatttgtcctcattgtcccaaacattcattgtatccatggctccaaaaagaatcagtcaggaatactacagaggcctggttgctgccttctaggaacttgtaggctaagggagaggtcgtgacacataatggccttgactgcatatgtcagcccaggcatggatactcacttctgctaaatcaaagagactctgcatatactaacatgtctacaagcctgaagtcctattgtaacattgggcttcttcccccaccctcatcccctgtcttgtactagcttccaatttcaaactagccaaatgagaattggctaaaccaatttttctagtctttctctcccttggtcttctgtttgttttgttctaatttttcaaaagtctggacgaaaggaatttgggttgggatgataccatcattctgtcacttctaaattcattctgttaacaatttttagagtcacatgggtagaagctttgattctgaaaaactatgcacttttaagttttgactccagaaggtaatttcaactcagctgtaaacaattcgagagggtgaatatgaaagaggaactgcctcaccaggcttcccccaccctggcgtctggagtcctccctgccttcgtggcacctgatttcagagataaagaatttcaaggatatgctagagcagggaggatgtaaaagggaaagacaactgcagttagctcaaaaccagactgtgtgaaacagccctgctgctttgtcctttctcccatcccccactcactcactgatgccttccatcacccggagattacagggaaggctggttattgacagctgggcagtttgcacaataaagtttaacggtttacatctctttgtacaactttgtcaatgttttccatggatcaccttctcaggtgagcccactgactcctctccttcttctctttcccttcaagcgtgcaaacgcaaagagcaagaaccaaacaaagacaggaacaattcccagaagaagtcccgcctggtgttcactgacctccaacgccgaacactcttcgccatcttcaaggagaacaaacgcccgtcaaaggagatgcagatcaccatttcccagcagctgggcctggagctcacaaccgtcagcaacttcttcatgaacgcccggcgccgcagcctggagaagtggcaagacgatctgagcacagggggctcctcgtccacctccagcacgtgtaccaaagcatgatggaaggactctcacttgggcacaagtcacctccaaatgaggacaacagataccaaaagaaaacaaaggaaaaagacaccggattcctagctggggcccttcactggtgatttgaaagcacaattctcttgcaaagaaacttatattctagctgtaatcataggccaggtgttcttcttttgtttttaatggctatggagtccaagtgcaagctgaaaaattaatctcttagaaccagacactgttctctgagcatgctaagcatcccagaaacccaaatggggccttcctggagcgagttaattccagtatggtgtcaaccaagctcgggattgcttaaaatatcatccatcccacttcaggtcctgtcagcttcttgcagtcagagttcctatgagtaacaataggagtttggcctatgtaaggactctgagtttaggcttccaagatacaacaataagagaagaatctagcaacgagaatgacctcatttgctttccacatgcttagcctcattataccatgttatgtccaagttcacagccacaacatcagaatggtaattactgagcacaagttttaaatatggacgttaaaaaaaaaaatccaaggacctgtttttccaacccagacatcttttcattgaatgatttagaaagctttaagttgatccagcttacaattttttttttctttacctcctggaaatctcatatggtcttggatccgtcaaaaaaaccagtcagttcacttgcgctcaaagtatcaagcacaacaaagataaacagaagtgaggaaggttctgggttcactacatctggattttcaagacacctattgtgaagtcattagggaattgatgagaatatggcttcaagcacattttgcagtttgctacaaattctgttgtacataatgcagacgcacactcaggaggccaatttaactgttaacagtgcatggagcgaatgcagcattttaaaagatctaggtttttttaggtcattaatgtgtccttggttgatcagtcatctggtccctcctactgtgtgttatgaccaccacgtaatccattctcgctctttctgatttggggtttttcctcatccatcccattagtagggatgttttctgtgttttctagcaagaaaaaaaaatcaatcaatcaaacctgcatacatgttactcatgactgtcatctagtcctaaatctcttctgttgttgaatcatccttgcaaaacagctgaatacatctggagaaaacacagcacaccaaagaagcagaatactgcaaaccaaagacatttatgacttgtcattttctagcctaaaaatactgtgattacttttagaaatcagaaaacctctgcaactccgaatggcattcagctcttgcatttggcgcatcatcgggctgagcggaccagctacaccaaggacattagccaagccacccagaggggtggctttgccacaccagttgtcaccttcccatagcaagtggaagagcgcccacagaactctgggagattgcaaaggtcacaatgtgcatatttaccagtgaatggccccgggtggggccacgtgggggtgttcaaagcaagccaaacgctgcaatcattctttacagacacttgagactgacttttttatgaattacttagtcgaaaccaaagaaactttttctgcacctacttctgcaacaaacaaaactgtcccattaaaatgaataaataaatccgtaaatcaatggaaatcaccaccaataagaaggaagcacgccagaaaataaacgaaaacaaaaacagggagacacactgtgttcaaacagacctcttgggacattttttggaagcagattttaaagaaagggttgagacaaagatagaaataaggaagagcctcagtggctgctgcttcatttgacaactcacacggtaatcttaaagctgaagattgtctttaatttgtgcctatgcagtttttcaaaagaacacggaacagagcaacagaaacctcaacagctacaataccaaagatgaggatttctcacaccttttgtttcagttcattatctcctcttgcctggctaaaatactaatagcgccattgaactgtataaaggtaatcaattatgtttctctgagcaacaaaaggaaagggccatttatttgattttattgtttcatttcaattttgtcttatggttttttgccccaacatggaatctctcaaaagtttccatggactccaagtttaagatgttgggatattgaacagttctctctgctcagcagagggtagggaataacattatcacttgaatgttctttgcttaacccttagacttggttccttctatgttcagagtctcatcatcaggggaaggaaagggagtgagggtcagggataggggtcttggtgatgcatcctctcccgagccacagaaccaaagagtttatagaggaatttacagcctcgttttcatgtgattgctacatcctaacagggcttcatttgggggtggggggaaacatgtaaaaataattgccagtttctacttttctattagctttttaaaaatcagctgtaaagttgcatttctaaagaaagatatatataatatataaaatacatatatagatcaacttgacattggtgataaccaaaattattgctgtccaaattcatgtcttgttttggtccagtgcttcatttgctaagtattcggttcagaatttttctcatttctcatgccattccagagttaatttgccactgtggatgatttgaagtattcagatctctatggaagtttctgggacaggtttaaagtcaagatcaagcattttagcatttaacctgttgataaatggatccatggtgtacatgagttttatttgtattcggagtcatctctattctatccctcagcctcgattaaggtggtgagtgaagtgcatccaacagactcggcccagaactgggtcctgacagtggggtgctcatcttctgtaactgttgggaaggctcggtggtccattttcaccagttaaagaatatgaggccagcccagaaatctgttctccaggagctgccctgtcccatctgggtgtgccagaccccctcagtgagcaggtccaccaaagggacttctcacaggggaagcccaactcctgttgcaatgggttgatagatttcctcagggtggtaattaccaattcgtattttgacaagcctatgtgcaaccacagctggcactggggtgggcagtggtgttgggtgggatgggggagagtgtctcaatcctgaagagaaaatataaagcaggttttggggagacttctggagtcctgcccctagagagccccattgttgttctttgtgccccctcctcattccccctatgtgggtctccctatgcaggagctgtgagagaatgtgactctccacaatttttataattcatccttcctaggagattgttcattggctcttcccttgtgtccctttgtcccttgctcatactccatgtttcctttgtcaaaggactaagaaaagagcatatttcagcagaggagtgttcccatgtgggttgatttcaacttgggtatttctaaaagagtccttgtgacatgtgtccagtggaaatggttgctcttttccagactggattgaggaatggagcctgtttgatttggttagtgattctttgacatactaatctcagcgtttgggtctccagcatcctctgaagatgtctagactagtagaggctgcctttgtgacctgacattacaacattggtcaaaccagtcctctgataatcagaagaacatgtcataattgtttaaaaaaaaaaaaaaggcaagaatttctctccaaggagctttaataaatgtctcattccagataatgtcataccagagaaaagtgcttgcttttagaaaattatttacatacatatataaatatatatgtgtatctatacagttatgtatcaaaattttaagccctgcagaatttcaatttgttagaaatctaacagaaaaaaatttctatattgaaaggtaatagaatttaacccagtgagtttactcaaggatttttaaatttaagttaataatttcagagaaaataaccatttgggtgtggttatagtttagtatccattacctcaatccaaggaaaattccaggcattcctcaaccatcaggaaaaggtacagtgtgaaggaacagttctcagccaaatttcacattcttgaggcaacagaaatcaaaacactcagagccattgagtggaaaaacaatttactttattcctttacacaaataggcttgcattgtttttgttttaatgtgattttggtactagggatataattatttcattccaggaaataataaaaaaaaacagacagagccaatacatttctttttttaaaggaaacagcaacaacaataaaaactcagcaccaatatttaaaagcttttccaaaatgtaaaagaagtgtttagcttgcaccatgcataaaggtgcaggctagttgaaccaggaagcatggcacttcctctggagaaatccagaaagagttgcttctaagctcccttttccccctgcaggctcttggcaattgtaggctttagcaaatccagaataattttcaattcaagctaaaataaaatcaacatttggaatgtaaatctgatacacacacacttttctaagtcaaacaacatatttcaaaaccaaaaataaataccttttagataatcagttattttctttgtctatactgggcacccacctactagtgccagtaaattcaagttgaacagatttttaaaatcactattatctgggtatgggggaaacttccccacttttgaaaatgttggtagaattataggaatgtctgtttgattatcattaccaaagtgtcatgacagtatgcctttgtagtgaactcggattttcaggagtttgaatagttggatattttaaaatctaagaagaaaaggcctgtttccaatgttgttgaagaataatgaactctattaaaaagtggagaaaaagataatacatgtggtcaaggttgaccacaaggcccaggcacaactaccttggcgataatcttctagattcgtaacaggttagagctgactttttgtttttgttgttgctgatgctgtgtgattcagacttctcagcctaaccaggaagagtaagtggaaatggtagatgaagaaggggtagagctggtgtatctataactttctgatatttgtctgccaaacttgatatattagtaatttttttatctttagctaagatcaagtcacccctgaaacaacaggagattctagttttaaaataaggccacaaaaatccttacggaatgaagaatggcaccccagttggttgtataagtctcataagataatgatgttgattttaaatatggatgtctcaatgcctgttttctatcaatgatttgtttgtttccaaggtcggggagggaaagaggggagggtttatctgttttagaaagtctcagaatacttataaaatacagaagtagttattaaaatatataggacctcacataggtagatacagaacttaccattgaggctgatgggctgttgtgtgaatcacacaggaccttaaatgaggctcattattctcacacaccaaaatgactctgacagcctgaagcagttattgctagagcccaagctttccttggaggttttggagttaggttgattggaagtaaccagctaataccttttctagtggagaaaaagacattgctaccagcttgttcatcccatagaagtcttccactctgctccatttttagcagcaagcatttcatgtagcataaaccttggcagataagtgtgcctaaggtttatacagtctgtccgcttggatgtatacaaatttagatacatattttaacatgtgttctcatagatgactttataacaacacacattacctataggtgtctagactgtgtacatacaagtgtgtacagacaagcttcatacgtatatactgtaatccgttacaacaaataaattttaaatcatcgtttaacatgtatgtggtacttctacagtgtacattgttttcattatttattgtaacattgaaaaccacagtgcagggaaaacaaaagtatcccagcatcttcatcctgtacacttggaattaatttcatttgggcatatccaagataaactcaactttcaagaaatcttgtatattatttaatcatctgtgttaggatgacacctatgattgatgacttcggttgaatagctttattctggatttttcataactaaagctaaatccaaagacctgaaaaaggacaaaaagaaaaaaaaaaaaagaaaaaacaaagaaaaagaagaaaaaataataaagtcaagcgcaaactgatggggagacagtgggctctggtttccaggattgagacaatggtactgcggtcttggggagactgcgttagctagtggggagtggtgatttttttcatgcttgtcacatctaaatggtctttaacatgagaaagttttagaggttataatttcctgctttgtttttatttagactatcaaatgaagttatacatgttgtcagtcaaaaaatgaagacaccctctgccccaccccacagaatgctttttatcttgtctctttgggttatgacccaacaagctaagtaccattaatgtaattaacttatttaaattagttcctagtacataaatgtataggatttgggtaattatttaatcatccttccttagtttgattctactccttgtacttatttatcaaaacctagaccaatggtgcatcagagatgcaaaattctacttggaatactcttgaagtttagtttgctttataaagcagtgaaattctgttacagacagggaagaaatacaggttacaaaaagagaatttgggatattcttccctcttaaattaacttttaaaatagtctaagtaacaatttttaaattatttaacttaagttcgcagccccacctggtaccaggcgaacttcacctcttaattattgtggccctcggagccttcatattgtaacttatttatttaacttattcagcatctgtgaaaggtgcactgtatagtttatatttttaatttaaaacaacagagagcactgcagtttgtttgctgtcagaacaacagagcaaattttgtggacaagcaatgactattcagcctgaacctgtgcattcagaaaacataagctgagaccctgcttcaccagcctggatttcggggcttctatacagaaactggaaaaataaattttaaaaaaatcgtaaacaaaaagagagaaacccttacactagctgcttccaagaatgaactctgtgtgtatgtaaagcaacaaaacaaaaaaggaaaaaaacaaaaagcagaaaaaagaaaaaaaaaatgaaaaactttctatttctagtgagaaccaaagaaggctacctcactgactttttccatttgtaattttaatcgtgttgatgacaccaaagataccaaagatttctttctctgtgcggtctgcattttgcttgtgctcttttataatttgaacgattttctctgacatatggtatgtacagccacagctcagataccccaaagaaataattatctatgcgacggcggctgctaatttggaaagggatattttctgtgtttctcttatatgtttgctgtctgctcgacatgttcaagatgcgagttcagatgctgctgtaattggattccttaaattctgattacaaattgaggaaggaaactggttggaaatggccttcagtcctagccatggcctctatccccgctgggacctgtcacagtaaagactgccaattactgaaccacagaagctctgaccattgagtagttgagctggaagagaccttaggaatcatttagtccaagccccggtggcccagaggaatgaaatagttatccaaatcaaataactcttgagagtgaaagcccacacatgcctcctggttcctgccccagtgctccgcttattgtacagtgctacctctgcatgagagcggtcccacattgacaaataggatggtggcaatcctttagcaatgagcagggactggggtttatctcttaacattttcagctgtaaaattagtcacaagcattttcagtgtcccattagtacatagtcacatatggtcggttgcttcgtgaaggtggcctgtcttgaaatactagggctcatacgggatttttgccctaggaaaaacatgttgatcccaatgatgtgatcacttttgaacctttccattacaaagcattgtatagataactttttaattcagtaggaggagaaagttcattcttggcctgttggctttgattattatgggtactttaaagtcagtatttatcaagaaagggaacttgaccaccattggcacatgtgacatttaagctcttcagccttttcctttttagttgtaggtgtttacatttcatttctaagccaactctgtatttatgagagaagtttaagccttacatcatttgatactaaagggttatttgtggtaaatgaaaaatgaccccaaaattacagaggaatatgccagtttaagaaatggctacttaaagttgcttctctctttccttcttactcatgaaattaattggtcttcttcaagtttctttagattccattaaatgattaaatcactattaagagccattcatcaacgtgatttgtgtgttagccaatgaatctgtctcagcttttgaccaaatgggttttagacaaatgcaaagatctgcctctagtccatatggctctttttgagtgctagtattttgcatttcacataatgtagttattttgagcttttaaagagagcatttagacaaagaagcaaagagaggaagggaccaatcaactcatcagttccatgcatcaacaaagcatagctagtagaggaatataaatgacagattgacaaactgtaggaaacactgttactctctttctgaagttttcaagcaccatcctatgtgaaagttccctcctgtccaaacaagctcaaggcccatcttctccctatacaaggcaaacctgtaaggccttccttccaaagagtacattgctttggttttcttcctaaattcctattggaattagaactctcagaatccctgggagacagagcaaagatgacttaattcattgagcagcagagctccctataagtgaacatcaccttccccatctttcctactgccacacccatacgagagaggatctagaaagagcgatggcagcctgaacacagaaaacatccccacttggcagacctctcctcagcaatccccccagcctcatgcttcacttgcaaagtgtgacataaccacgggacgagtgccttgcttgaaccaaagcaacgatttagccagtctggacctctctgtgctttttttaattcttcctgtgaatacctcagcttcaactgggcctccatacagtcagttggtgggcttattgtactgtggtgctttgcaatgcaaccctgcaaagaacaagatttgtactaataccaaaggttctttctctatgtctcctcctctgcctccctcgttcttcccttttttctagttcttcacggttccaaagctttactatgaacctgggcatgttggcaatgcagaccgcgcaattccttaccgaattttctcagatatacctcatagacaatagtgtttagagtaatgttattatagcgtatgtaataaattattcactgtttcttttggtaactgtgatttaaaaaaagaaaaaagaaaaaaaagctttatacgttttaggttgtgcttttgtaatagatgaaaaaaggtgcgcttaaaaagaaaatgtatgtttttttccccctttggattttatttatgctggattggggaaagttgcagaatgagcccaaagtttacagtttcatattttgctgaagaaacaatctgtgttcatttgctctgttgaaaagaataattattttctacatttgtgccacttggtctgaacaattaattgttccgtgttaacagtgtagtattatgattagcaactgccaatcagtgctataattttatgcatgaggctaaaaatttagcagtgtgatgcattgtggtcttaatagcaacatttttcattttgaactagatcttcccctttggttcaatggactttatttatgcatgggcgcctattgtttgttagcagttgtggaacagttgtgtatacattaaactgtgaaaatgtacacagttcagcctcagacggtggtaatattggttttattgggagatgtgtcacctcgaaaataccctttacatctgttgggatctgaaaatgagtcacattgaattgggttccagctttataatgagaaacgttattcctaatttttgagttagccaatttgcattccacaaattgggatcctcataacccaaatatatcaccgtatgtgagagggatttgaaagcgagtattgaaaaactcacctttgcatatttaatttccaccaaaaggagttattttggctttatgctcatgaacttagacctaactggccatgtatatgtagatgcaaattcatctagctgtggccctctttgatctctgcttgggaatggctatttttgactatgcgtggtttcttctcgtattttgtgatcaggtcagctcccagtagaaactcaaatggcatcaatattactaactcttctctgcccacttctcttttgtccactctcctagacattcccaccaactgttccagtgatttgggcaaaaatacgcagccatttcccaaaacttcacatgtgcagctatcatggctgtccctccctagacttggaggtgactctcacttaatttttacctgcccaacaatgttccatctaccatctaaaaggtaatataagaagaagttttgaaacccactttaggaaaaccatcttctttaaatccttcaattatctgaggcctctatatgtcaaaactatttttcagttgcaggggattgggcaaacttgttctttcttatacttgggttcaaagacccattctccagtttcatatttcccaaaccaaaatgcttgacataaagccaaatcaactgccaagcacactttattttgcataggagtatgcagcctagggaaccttggttgaaaagcagcagtctgctatgcaaaatattggaaatcactgacagtgtagcattcatattatctgtcaatgagggtatattgggaacgtgctctcgtgaataataaaaagcaacatatttttatttggccttataaattaggttgtggtaatgtaaactttgatatatagtctttttatttttctcttattaatctgccaaagatgggaacagatacaagaatttttcaaattggcttttgtaagacaattgatgattgtaatagtgtttaatcttccagaaagctttatatgttgttccacaataaaattgatatttgtttcagcaaagttttcctgacactcacaaacccacaaactgttcctcttaatgcagatattgtagaatctacaaagttcaaatccatttttgatccaaagaaagtagaggagtatttgagacatgagtgtacccagccctttttttaatcacaggcaatgcatgggtctggctggttacactttgccaagaagacttgtcttatgaaacccaaggtatattttgttatgccattttatgtccttttcttttaacattgtggaaagtggtatgttgaatcaagtgtaagctgagttttccagacaactgaagtagctacatcatgaatgttattttgttattaaagggtttttactcagtgctttgtgccaatggatgtccttttccttggagacacataactacaaaattacctcagcttggcctggttttctctcctgccctcttggggaaacatgggcctggcctgggaaaaggcaggtcatgggctggaaggtaggttttggtactaggaagaaatctctgtatctgtcagctttaaagagaactgggccaaaaatctctaacctcactctctctggactccaacacttccctgcaatcctttggtcttgagcatgtgccagcatgaaggcagactccagttcatacatgaaaggcaagaaaaagaaaatagtaaccttgaatcttctgtgggccaccaggcactcacctttccccaccttgcacactatccagtcaaggctattgcagcccatctggtggctttacatgggacattaccaaaggcttcttcctccatcctggggttgcaaaggatccaggtcccctccatccagtggggctcttccacatcagaagtccccctcccaccatcctctgcatcctgtttagctatcccatctataccttttggagatgattatttagaaaacaaagaaaggtatggaatggggtttcctattgtttgctaggttatattttagcaattctcaattctttgatctggaaaaatacaagagggaaaaggagaccccactatctccctgtgctttgctcccatctcagggggcaggggcagtgcacattgcctatgctgttgatctgtcttgggcgacaggctgaatcacagctattgccccagccaaaaacatggcccatcaatgcctactttatctctgcttgaaaatcctattcaaaaagttgtagagtttgaggtttttatccccccatatcctttgctttggtccagtttggcctttagcataagagtcagctttatctctaggaaagttttttcagattatgacaaggaacctgccacctgggaagaaaagagtccgaagactagcaatcggataggtagtcataccattaacagatacttccttgaaggtagaatattatttcctttctttacagttttgtgttacacaagtccaagtggtgccagcaaacttcttaccgtgaaatgttgtaaaacacctggcatactgaaatttctgaaacaaaaacacaagctccacattgataacttgataaataaccactaaagtttagatgcagggactgagatgatacaggcaaaatcttggtgttggtttctcttttaattcgtatcttcgatcacctaacctttctcaatccaagagcagttcagtcttttctccccaagtctaggatgccaaagagcatcataggaaaagataattagggattgaccagcatttcaattagttctcttcttcatctttgcatttctcaaaagtgttctcctggaccagagggaaagagctggtccattttttttcattctttctattcaaatttttccacccagacaatactttattaacacagatactgtagatccttccttggtcagtgaattattacaagaggagctatccttccaccaaagtgagtgaaaacaagttccagtatcttttcttccatccagttttgttctcagaatccaagtcagtcctgggtcttttctcactttagaccctggcctcagatgtgtttattcttgctatttaaaaatacctttaaatttcacatgctggcctgcagaacttgcatcctttgttctatactgttgactgcttgatggtattgaaaggtgactataatgagggaagaaaggaggaggtaaagagagaagaatttgtcccagatctgtttaaagtttcaaaatttaaaaagggacccattaaattatgggaaaatggctatagagtgtgagcctccgttgaccatatgctcaaagaccgtactctgccacctgccttccaggtagctattctagaaactcagtcctttgtggaaacccaactaccttttaaaagtctctttccagattccaaaaggacaagagatcagagagtcacatatacgcctcttgttttattttcttgctttcacgggtattattgccaagaaaatcgtagggaaaaactttaaacttttcttttcagttgatccctttgacatcacctctcatgtttaaaatcaggaaaacacacccctaaaatttgcactctcttccgttttgaaaaagaaaacccacacacaaatgcacactattaccgtctttcaccctgcgctatatttccaaagtgtattataatccagatattgccccatctcaaacatgttaagtcagactgtgctgaaagactttccagggacggtcaacagggtatatgttcagtggctgccctgaaatcctggtggggatgaggatcacgcttcatcatcaaggggatgcccatcccctgataagctcccagtccttttggaagatttctttgaatgttaattgcattttcagttttgctcatttcccaccccaatgttttgtctgcaacatcgcttacactggattctttctatttttattcctatcattaaatggtagtgctgtaaattctgcaattaatgttaaataaactgctttaattcattgaccatggctcagttgccttctttttcttttcatggaaggaattaagcactcttccccctacagcaccccattgtggtttcataaaaaaacagtaaatttgttcttagtgagactacaatttctatctctgacagtatgcaagacacatcttataatcaacaaacctgttatccttgttataaatcacaaaagatgagagatgctccataaaaactaccttttttcttaacctgttaacactttagagatagcctgtcctagacttatctttgcacagattttgtatgaggtcacatatggtgagtcaaaagaaggatcatgttattgtcaccctatggaagaatcaagaaaaatagaccaaaaaaaataaggcctcatatgaaatctaaaccctgcaacaaattagttgtatggctttgagcaagtcatttaaatcatctgggcttcagtttctccacctgtacaaggtcaaggttaaacctggttttatcaaaagtcccttccatctttgcatttgccccagatttttgaaaatactaacatttttatacagattttatcttggcttattattttctctaagttaatgagctaatgagtttgtttattcgttttattttattttattattttattttattttctgagatggagtctcactctgtcacccaggctggagtgcagtggcacaatggctcactacaacctctgcctcctgggttcaagcaatcctcccaccacctccgtctccaagtagctagaattacaggcatgcacccagcttaattttttttttttttaattttagtacaaacggagtttcaccatgttggccaggctggtctctaactcctgacctcaagtgatctgcccacctcggcctcctaaagtgctgggattacaggcatgagccacctcacccagcccatctattcattttaaatttagatatctgagattggagactattattctaagtgatgtacctcaggaatggaaaaccaaatatcgtatgttctcactgataggtgggagctaagctacgaggatgcaaaggcataagaatgatacaatagactttggggacttggggggaagagtgggaggggggcaagggataaaagactacgaatatggtgcagtgtatgctcctcaggtgatgggtgcaccaaaatctcccaaatcaccactaaagaacttactcatgtaaccaaataccacctgtaccccaataacttatgggaaaaaaatttagatatccacaagcttcaaaggagtcccattgggttaacccttggtctaactcacctatagcccaggccatgaagcactgattgccttcatctagactggtggttttcaaccctgggtgcacatgagaatcacccagagagcttttaaaatatactgtacctaaagtccatcccagaccaattcatccaattccacaagtgtgggcctcaaacattggtgtagccattagcttttgctagagttagtttgttagtgggaacaaaccaccctaaaacatagtggcttaaaaagcaactatttttaactcataattctgttggttgtcaatttgggttggtctcagctggttagttcttctgattgggctgggctcactcatgcatctgtagtcagctccccagttggctgggggctggccagtctaggatggccttagtttaatcaactgagctctgctctcctttatcatccagcagactggcctgggtagggttccaagagatcaagtgaatcacacaaggccccttaagaccaaagcatggaactggtatgatcacttctgctgcatcctcctcactgaaggacaccataggtccagcctcacaggggtaggagtgaaaagagattccacttgttgatgggaaaagctgaaaaagcacattaccaactgagaagtgaaagacagactgtagccattttttacaatctaccacaatctatatttttaaaagctctcccagagattctaatgtgcagccaaatttgcaaagcattatttcaaagcctagtgtttttctatttttttctcacaattcaacacttatctgtgttaactccctcaaatgcctttatcgtgttgcttgaactcattgtatgaaaaaacaattcacaaccttcaaacttgtagagtaggtatcattacaggctgaatttatacagatgaaaaagtcttccacaaaccagagggatttagacactggttttattggcaggtgaactcgcagcctcagctgctggtggctgcaaccactcactaagccatcccatgtccagggctggtgggaagccctgggaaggcaggagccacacatggagttctttctgttggaggaatcttgggctgtctcaggcacatgctgagaatattactgggcctaggcaccgccttggggtccatcatggagatcttgactacaaagcagcatggcctctggttctaggatgaaatccctgttatcataatgtgcttttgcaccattcttcctcgaatgtcgtgtccttatttattcgcagacctttggacagaaaggagcatcttaagagaacagttgcataaatagtctcagcttatgccaatgctaaactagataatcaccaaaacctcttccacctctgctatttcctgtttctaatgatccatcactcttactcagagaaggaaacagtagctaaacctggcaaatttcaatgctaagaatctctggtctcagtttagccacatcaggatagccaaactaagagaaatgtaaaagtctaggtggggcctttgaatgagagattaggctcattgaaggaaaatacttccacactttgggagctcattggcatgagcccatttttttagcctctggttaagggcatttgatggtatgaagtatcctttagtcaaaatgctttaagttattggtaactgcccttgcaaatctattctctcacttttgtcttctccctggattcttccctccttaagtggggctagaaggggggaaatcacttgcaaaaataaaattaaaaggaagaataaatccatgtggacccattaagcatgaggaagcattgctcagtccacagtggctcactgagcacaattatttctagaattaatgatggtggttgccaaacttagaggcagccactatgctgtcacctccagaatcctccttccttgatctgcacaacaatcatttaggggacataggtagggcagggtgcaacaacctcaggaccaagaggcagaattagcattcaaactcagatgtcagagttgaccccgtgcagctggtcactcggtgctgcaccatggagacctggaagttagtagggcatgcttcctcgggttgcagtgatagagcatatattaccaagtcattcctgctatggagccatatcagctgtattccaaataagtcacacagacaaaaaaaatgccaggagttcagaagaaatggggatcatgccaaacggggctagttcaaaaagggctctctcatttcataagatttccaagtactacagttttattactaaatctaattgagcataactcaatgcatggccaagtgatctcggtttgtgggagtagattacatttctgcccccacgtagctgctcccaggtaactaacctaactaccccaggtagtattttcctcagattatcaatatgtaaatgtctggctcatgcctccagtagtacttctagctctgatttgagagagaaaccagcggtttgagtcagaagatgttaattcatgtcctaggcctacctcttactgatatgtggctctgggaaagtcatttaaattcccatctataaattggggataagaatataaattgtatcactgtcctgcctggttcacaaagttgtgtgtatatatgaatatatcgctattaaagacaaccaacattttataaaagagaaatctgaggctcagggaggttaggatacttggccgaggtaacacagtagtggagccagaatttgagcccaggatcgtcagcttcaaagcccacctgaaagtgtcaactaacatgaattcccctagtgacaggagagagctgcatcatggcactgtagcgaagcatgccacaagacgtaaactatttcttaacaattagctttgacaatggaagtgcaactagtagaagaatttataaacttcctcagaaataatgccgcatatctacaactatctgatctgtgacaaacctgagaaaaacaagcaatggggaaaggattccctgtttaacaaaatggtgctgggaaaactggctagccatatgtagaaagctgaaactggatcccttccttacaccttatacaaaaatcaattcaaggtggattaaagacttaaacgttagacctaaaaccataaaaaccctagaagaaaacctaggcattaccatttaggacataggcatgggcaaggacttcatgtctaaaacaccaaaagcaatggcaaccaaagccaaaattgacaaatgggatctaattaaactaaagaccttctgcacagcaaaagaaactaccatcagagtgaacaggcaacctacaaaatgggagaaaattttcgcaacctactcatctgacaaagggctaatatccagaatctacaatgaactcaaacaaatttacaagaaaaaaacaaccccatcaaaaagtgggcaaaggacatgaacagacacttctcaaaagaagacatttatgcagccaaaaaacacatgaaaaaatgctcaccatcactggccatcagagaaatgcaaatcaaaaccacaatgagataccatctcacaccagttagaatggcaatcattaaaaagtcaggaaacaacaggtgctggagaggatgtggagaaataggaacacttttgcactgttggtgggactgtaaactagttcaaccattgtggaagtcaatgtggcgattcctcagggatctagaactagaaataccatttgacccagccatcccattactgggtatatacccaaaggactataaatcatgctgctataaagacacatgcacacgtatgtttattgcggcattattcacaatagcaaagacttggaaccaacccaaatgttcaacaatgatagactggattaagaaaatgtggcacatatacaccatggaatactatgcagccataaaaaatgatgagttcacgtcctttgtagggacatggatgaaattggaaatcatcattctcagtaaactatcgcaagaacaaaaaaccaaacaccgcatattcttactcataggtgggaattgaacaatgagaacacatggacacaggaaggggaacatcacactctggggactgttgtggggtggggggaggggggagggatagcactgggatatatacctaatgctagatgatgagttagtgggtgcagcgcaccagcatggcacatgtatacatatgtaactaacctgcacattgtgcacatgtaccctaaaacttaaagtataataataataaattttttaaaaaaagaatttataaacttgcttgttttgccctgaaatgactattcataaaaattgccgtgagctgactaagccaatttggttatgcacaacatttaggttcttgtggtagctaatggtagccacccaaaggttttgagatgggcaagagtcaactacttccccacaacttcttgccagattttaaagaaagtgagtctgaaaccaaatgttgccacatataggtatttacttaacatgttttatttagaaaatcaggcacagaaccacacataccactcacggtgggagttctgtgaagtgtgagatctctgtattattgggagtcctaaccatactccagatagacctaggaacattttggaggcaggctttcattagtccttgggcagcatcagacgacaggtaatattctagactgaggactgaacacaggaacttttagggatcaaacctctcctctattccctaaagcaggctaaaggtttcactgaagtcttatactctgtccatgcaagagaacagagttagggcttccccaacccacctatctcaaatacctttaattttaccagtcaccagaatccatttataacattttccatgatacagtgataggcgactgtcttgtagtagactgagatgtggatggctgaagcactgttagtgaccagtctgcagtgagaacactctgaaataatgttcaccaactccctgttcttggttaggatgatttactgcctccatattgaaccttgaacaaacagacacatgagtaacaccaagctgtctgtgccaaagtttattaaaataagtcacagtcattgcaacaaagaagaaacatagtcccatcctgttgaagaccatatgttaatttcaatataatgacactttatgtgtgcatttattcatctcattttttcctgcagcctatactgcaggtattattattattattcccattgaataattaaatggtaaaagtttaaatcatcttccactgcctcatgtaataaggacagcttacatgtgtagatatttactctgtgctaggtattgtgctaaacttttcacgatttatctcatcttgttctatcttgtgaggcaagtactgtaattatccccacaatacatatgaaggaactgctctttagagaaataaagtaacttgcttcaggtcacacactagacaggctgactccaagcctaagctattattagcgtcgagttttccttcagccaatggcagagcttatcctcgtattcactgcttaggactctgactcatgtgttctttcaacagaattctgattgctaagcagctgagatgggtagaagtgaaggtaactagtgctaacgccctcccagcatctccaatataaatgcattcacagccgtgatgctgtggtttatggctgctcagaacttgctcacatttccaagtcttcatttcacccttggagaactccattcaggacatgtatgtagaactccatggagcttacaaccaatgatttgggatgtcccaaaccacacagaagcatacagaagtgcaggtgagatatcactgtgggctgtgcatattcacaggattgcaagagctgccacattgaaaccagatagaaagagcctggtattggcgtgaactagtggctacaaatacatctcctaactggggcactttgggtaacctcacttgagctttaaatggtctcaaaaatcatcattgccattgttgtcatcatcatcttcaccttcaccaccctggctgaatttttaggagaccagtaaataacactcctgctttctctttctgagtttagatcgaatagaaataagacacaaaaatgagagtctttttaaaaatcagctttattggtaaagctgattccccccaagctgagcttccccgcctaaatctgcagtccaattctttcttcacccgtcacagggaggcgggaaggagttactccaaagagcacttccaataaacctccacatgtaaattttggcttctcagagtctgtttcccagggaacctaacctaagacacccatttacatgcctccctttactccacctcttcccagaactggcctattctacaattagagaccttcctttcctaaggaaaaatgtgcaaaataaaatatcaacgttctctaagatctgctgtgagaaggtcaaatcagaacaatggacagcctccaaaaccatcctccttcccatgcttaatgactgcccactgctcctcagctgcctccctctggctgggcctcttcctgctcagcattctagagcagccccgcaggctctcctctacccacagggaagagcagaacaggagacaggaggtccttgttccttgatgggctgaagaaggatgttcatggtccactgtaccaatgaggcaactagtatcccttcagagaagcagttgcaccttccaaacccaatctggccatctagctactcaggattgagctatgctcaggcatttcttccagggacagctttcaaaaaccacaagtctaagaacaaagaatgagtttgtacctcctgcacgcaccatggaaaaccttacacacagagagaatggacagtagcctttatggaatatgagataaaagtgctacctgctctgacattgtgtctaaaaccccaccaacacagagtactggggggagggggcattgtcctctttgggtattcacttttgtttatctttcctttaaagtacatctcttacatttatatatatatatatgcaacattttttgttgtcacagctgaagaagtgttgctggcatctaaagggtagaggccagggatgctactaaatatcctgtaatgcacaggatggccacccgctacaaaggttctccacccccgagtgtcagtagtccaagaatgagacactctgctccatacccatttccttctctcatagcaatgttatcatttcttttgtatgtgttcacataaaatctgcattgtagggtgcatgcattttcaatttatgtaactagtattatattagattatctcacgctaccttatggtttatactgtttttgaggtctgtttatattactgtgtgcactctaatgcattgcttctgggttctacatagaaatccacagaatgcatcaccacattgttcccatccatcacctccagaaagggatccccaggttgcctcctagtctctaccatcataaactttgctacagagaacatccttgtgcatgttccagtatggccctgcatgagaacatctgtggggtaaataccaggagtggaattgctggatatcaggtagatgtattgtaaacttgaccagatattgacagacatctctccagaaagactctcccagtccatactgaaaccagcaggccatgacgctttgtaggtccctcatttaaaaggtactcttcttgaaaatgcacataacctatattaagattagcatattaaatcattattaccttccagatgaatccatcagaccatcttcctcacaggaagtagcttcagtggcctgggtgcctaggctagaaaggcttcaggtaggggttataagtagaaagaaaagtgggaggacccaaagacagaccctcttctgccctccgggaaaattttcttccctcctgaattcgctgccatccgttttaatggattgtttgtgtcttccattattaaactttctttttaacttttataacttcaacttgaagggtgttttctttttccataagcagtctcagcctaaatcaaggggaacaacctagagaaacagaagcacgcagggttcagacttctgagaggcattcatgctcatcgcggcaccgctcctgcttcctcagtcattcagctcgcccacgggatcaataaagcgatcaataaagcgatagaaccacaaataacacaggcctatcagcaatatattagcaaagagtgtttaaaagcaacttttaaagaagattcaataacattcgactccaaagttggccaactccaatgtcctgaagctcaagttcattcctaccgagttagcaaatgatggacaacgagcctgactgtcagacagatgggcctggactgctgggaaggccatctggggatgccagaggggttggaccgacaacagggagccccctgggagggtcttatgctcttgatggcagtgcttttgagggccaaatgtcctcagaggtgggtcaggacaaaatcttctctagaataaacagctccttcaggtaacaaaagggattttgcaaaaccccattactttctaatacttttttttttgagacatagtgtcactctgtcgtccaggctgcagtgcagtggcacgatctcagctcactgcaacctccaccttctgggttcaagtagttcccctgactcagccttccaaatagcttggactatagacatgtgccaagacgccagctaatttttgtattattagtagagatggggtttcaccatgttggccaggatggtctcgaactcctgacctcaagtgattcacctgcttcagcctcccaaagtgctgggatttcagggtgtgagccatcgcgcccagcgtctaatacatttttcacctcagaacaaggagtagctactaggaaatccctttttatccactctcatgggtcattaggcaactgagctgagccctggggttcccaatgagcaccacccccctgggagtttcaggccagagacagaacacctgctctctatgaggtattggacttgatgttcaatcaggcaaaaggtaatatatataaactactacaactgggcctcacacacagtgtgagctctacaagtgattgctattcttattgttgatcatcataattgtcatcatgattattagattctgaggattcaaatgtacgtaagacaaagtcctttctttcagggagtttgtaggtaagtagtgcagagacatataagaaaccattaaaaaaataagcatgtagaataataattgaaagttacaataagggcagtggaagaaacaaaggcctggaagagagaattgggatgattcagggaattgtaaatgggattaagctgtaaaaaagaggaaatgctgctgggcacagtggctcatgcctgtaatcccagcactttaagctgccaaggcaggaggatcgcttgaacccaggagttcaaggttacagagtgagatcctgtaagcaaagcaaagcaaagaaaagaaaaaagaaaagaagcaaagaaaaggaaatggaaaaggagaggaggaaaggagacggggagggaaggggaaaagctgggtcccgtggcttacacctgtaatctcaacactttgggaggccaaggcaagcagatcacttaagccaaggaactccagactagcctaggcagcatagtgagaccccatctctataaataatataaaaattgtctgggcatgatggcacatgcctgtagtccaagctactcgggagggtgaggtgggaggattgcttgagtccggtaggtcaagacttcagtgagctgtgatcacaccactgcactctagcctgggtgacagagtgagaccctgtctcgaaaaaagtaaataaataaaagaagaagaaatgaggaaatgctatggcctatggtagctttgggctctgtccacttagatcttgagttcccagaattttcttccctgattagttgggggttcatatgaacataagagacattttgcacaagaaactggaaatcaaaagtaaatgaactggctttttttttttttttttttttatcctaggaagcacagtgcagggcaccggtgactggtgctgtcacagattacacgtgctgtccccgatccccttgttggtgcagggcagcagtccaccccgcagctcctgcccttgctcctcctttagctgctccaaatcctgggctggtgacagcagctccatgaagggtgccagctttttctgcagcaccagcatcgtgaaagttgactgtcaggaggaggcagtgagggacggatgtggattccagctcatccgcggagttcccactcatttttcttccccccagttcacattcttagattgcttgtgcttttgctgccacacctaagatcccctaatccaagatcatgaagatttacacctatgttttcttcgaagagttttataggtttagccctcacatgtacatgtttgatccacttcagtttttgtacatgttatgaggtagaggtctagctgttgcatattttcccagcaccatttgttgaaaagactgttctttccccatgcattgtcttggtagctgcactattttacattcccaccagtaacgctggaggattccaatttctccacatctttgccaacatttgatattgtctgtctttctgattatagccatcctaaatgggtgtgaagccatatctcattctcattttcatttgcactttcctagtgactgataatgttgagcatattttcatgtggacattgatttttaaaataaactttatgttttagaacagttttaggtttggccaggtgcggtggctcacgcctgtaatcccagcactttgggaggccaaggcaagtggatcacttgaggtcagaagttcaagaccagcctggccagcatggtgaaacctcgtttctaccaaaagtacgaaataattagttgggcatggtggcacacacctttaatcccagctactcaggaggctgaggcaggagaattgcttgaacctgggaggcagaggctgcagtgagtcgagatcccacaattgcacgccagcctgggcaacagagtgagactctgtcaaaacaaacaaacaaacaaacaaacaaacagttttaggtttacagaaaaattgcaaagatagtactgagagttcacacataccccataaccactttccactataattagcatcccacattaggacagtacatttgttacaattaatgaaccaataatggcagattattattaattaaagtcctttttttttcagacagatttcctttgtttttacttaatatcctttcctgttcattccatgttatgtttaggcatcctatctccttaggcccctctaggctgagacagtttttcagacttgccttatttgtgacactctgggcagttttgaggagtaccagtcaggtatttcatagactgtactcctattgggatttatctgatgtttttctcatgattagactaaggctatgggtctgggggcaaccacggaagtaaagtcccattcttatcacatcatatcaggggcatacactattaacatgacttaccattgttgatgttgacctagtcacctggctgaggtagtgcttctctgtttcctccactgtgaagttactctttccctaccccccttccatactgtcctttttggagggaagtcactatgtgcagcccacatttaaagagtgggctgtctttcttcttttccactttctgtcccacgtttcccatcttttcaaaatcttcagctcagctcaatcctagacaggggcgaagagttcatttgcagtgacacagagctgcaagctgcttcccttcctctctttggccttgccaagcttggactcaggaggagcagccccatctttgagaaaagttacctgtctctatatctcccgttgcgatggagacaatagtgtcagagttcctacaaaagtcccaatctcagcagtttggtccagcattccctaaatatgcttcaatcctcaactcaggaagaaaaagaaaaagttcatcagatcattaatgtgcatgcacacacacacacacacacacacacacacacacacacacacacacacacaaagtgtgatgtagagcagaccctccgcaaaattctgaagcagaaggaatttatctttgatgtcctctctcttgccttttcaggctctccctagaggtcccccatgaaagcccccatcctggcctgttctccagtagccctggatctctttgcctctcctccttcctaaactgggaaacaataacaagctaattagtagctgggattgcaaactgtgtccaggacaggcagagcgggatggagacaccaaactctctctaggggaagaaagaggccagggagtgtgggttggcaaaagcaatgatttttaattcattcacctgttatttcttgagaactttgaaactttcctacttctgtgctttcaacctatagaaaacgcagtcatcattgaacagtgaaaaattgattctgcttctaggagtttctatttagccaggggatctagaggcagctttagatttacatttctatcactccctttccaagcctgattaaggtaacctgtgcttcccaattgccccgttatttttcatagtggttacctttggcttctcacattcccaatccaactccattttggaaatactagtcatttctcaaaaacttaggcaactttttccctgtgtgaagttttagaaaaaggtttattttcccctctaggcttattttacttggctgaagtcattggagacaacatagactttgcatttttatcaggcctctttcaaatgtgctggcactgcagttgaattccaatgactgcattcaatgatttgcagtagagactatcaaaaatgcccacttccaaagctttcctgttgagaaaagtccagacagcacagcatttactgtctatttatcctcaagataagtactctgtcgtcttattcttttcacagataattatgagcactctcatttgggcccaacatttatgttaacagccaaaaacacacaaaaagtttaagataatccactttccttcagaagctcgtaatccaattgggagtcaaggtacacacataatattgttaaataacattctaaagtagtgtgaatatgtctgaaataagtactctaggacttacatatctacagtagtcaacttatgggacaagccctcattccaacagtactgccatggctcaaaatgtgtacatttgttacaattaatgaaccatccaattacaattaatgaaagatccgatcaatggacctttcatagggttaactccagtgctcgtttaacaatcacaaaagaaaaccagcttgtctatttcaatgttagagcttggttttgtggttgcttttaatattatagcttcctatttgatcacccactttctaaagctttgactagaaatgactttaaactataatcaaaataatatccattctcaaaggagtatttttcaacctgtttcattctcaatccaccagcctcctgccatcttgatttctatccagtctagagcatggaatttaatctctagtgacactctgcccaagctcttaactcctttgcttctgtgggcttccattccacacacatggaaacaccccagcctaggattcattccactttctgcctccttggctttacacccaggtcctcagaaactgggagttctccttggcttctctctgtccctcatcctttacatgattggtgacaatttcacttgctcaatatctctcagatctgcctctttttctgtccctctgccactgccccgtctcaaggaccctcatccatcatttcaatattggatctttaaaaagtgtcttgactgatctttttgcctacaggatggtctctctccaaatcagtgtcgacactgcagtcagatcactttttctaaatcattaatctgattttgtcacttcctaaaacaattccaatagttctccaataaacattttaggataaagtccaaagtcttagtgtgtctctcatggcttttcttgatctgaaatctgtccatcagcctcacctattaccatccagcctcccaccctagagccactggcaggtacctacaggctccatccacttgtttgcccctagccctttatataccctcttccttctttctggaatacttttcattggctgatgaactcctactcaccttttaaggcctatgtctggattgaaggtctctcctatgcccttccatgatccttccagttggggatctaccccttgacttgctatcgtcctcattgcactgtgagttgctctgaagtaagtgctgaattttactccttttcatatccccagaatctagcatgatgtcttccacataactgtactcaaaagtgtttgctgcataagtaaaagatttgatgccatgaggacattcaaaaggaaaataatagctaatacttgtagagaactcactatgcactaggcactgtcccaggcactttatgtgtagtatatcttctttttttttttttctgtttgagatggagtctcgctctgtcacccaggctggagtgcaatggtgtaattatagctcactgcaacctgtacctcccaagttcaagcaattctcctgtctcagcctcctgactaactgggataacaggcatgtgccgccatgcccggctaatttttgtatttttagtagagacgagatttcaccatgttggctaggctggtctcgaactcctgacctcaagtgatctgcccttagcctcccaaagtgctgggattacaggtgtgagccacggtgcccagccgtatctcattttaattattacaggaaactctgagagaggaactattgttatcctccatttcatagatggctcacaaagagtttaagtagcctgtcccaagtcatagtgggctgcaagctttcaaaaggcaattccaagagaagaattcccaggaccaccttctctccctggtaagagactgcaccaatgactgcattattggttactgatgatgtcacgctatttgcagctcttgccatcaggtacaaacagcccctcaagagcactgaagttatcatctaaaattacttttgctgaatgatgcttcccaggacctccatatgagacaacaaaagcagcaaggaaagttgagagtcgggtaaagatgattctttctagagtcaaggtgactaagccccagttcatgacaggcaattttccgattgattcttgccttttgctatatgagctggatgattgcctcatcacagaaccctaaacttactttgctcaggcttcctgagcacaagaatgggggggtaggaaaggctttgtcacagtagggaactttccacacttgccagagaagatcaacatgagacaaaggatgagtatatatgtgccacctaccttctcactcccctatggttatttgattttctgcagatcttagagctccagagagctgattttctgaccattcaagatgccaggatgatttacttacaggtaagttgataaattcatcctcctgctctatgtctgtaacaggactcgacggtgactgtacgtcaatgtataaagttcaacaaggaattttatgaacgtcaacaggtctcacggcttctgccccaagatttttcctgactctgtctactgccttctgacctcatttcccctccctcctcatcaaactttaggacattcatcttctagctggtcttgttcctttctcatcttccctcccttcccctaagacattatccatactacagctaaaattaaaatgacaaagcacgggtctgattatggtgttcccttgctctgaaaacctgaagtctcttcagttggctacagagtagtgtaaacaccgtaagttggcatctttcctgcttcccagcctcctatcccacttccctctttcttgctccagccatgtgtcaccacttacttctccccaagaactcccatgcactttcccaactccatgttggaaaatgcctaggaatatccttctctatcccatctgcctgctgaggtactcactgtcagtaaacgaagactaggtagttcagataaatccttcctcaggaaataatgaggaaatctggatgaaatacagaaatattgtattaaaagcatcaacaacctaataagatggtgaaaaactgctaaccaaagtgtgggaggggccaggcacctagagagataaacatcgcttggggaagctttcacctgggagcctgtactgatgcagaagagttgagatgctgggatgtgcttttggcagtctctcaaaagttaagggaacaaaagatagactggtggcctaccaatggctaggatgcttaaggactgcaccgcaggcatttagatacctggaagtaaatcagtccacatgcggtcatctgttcagccaagaaagtgtcaaaacttgaatgtgcatcaagtttgctgcccaaaactgctagcatccccaaggattgtggcagaaacaaacaaacaaacatctctccgggggaagataacatcatatgaggtcataaatatttctataaacagtctttcaaacacaatgctcagcacacagtcaaaataaccaaacttctccaggagtggggcaaaaccagaaactaatattagtctttgataactcaagggtgcatatagagtagcttctcatgaatagaaaataagaatggaatacttcttaactaataaggaaaaaaaatggaacaatagtattaataaacccaaaagaaggcaagaaattaaaaaaaaaaagggaacacagagcagggggcacaaattgaagagctattcatcattcaaggtgcagctcagatatcctctttttccctaacaatcccttatctcctcccaccagtccagtgctctcttcatactttatttcaatttctaccataccgtttatcccattgtgctgtaattaattgttcaagtgtttactttcccagttgtattttgcacaccttgaaagaaggtgttctgcttattcatctttgtatcttcaatgcatagaacagggcttggctcacaatacacattcaacaaatacatattgaagtaaatttagttgaaatgaactaactaaaaaaatactgaggtgtgatgctggtggagctgtcagtgattgttcctgcctgcagagaggagcacatggctcaaggaggctatcacgttacttattccccatatagagtattaatacaaaggcttatgacccaagtggtgctaatcttccataaaaattaggctgggcgctgtggcttacgcctgtaatcccagcactttgggaggccgaggctggcagatcacctgaggtcagaagttcgagaccagcctgaccaacatgtagaaaccctgtctctactaaatacaaaattagccaggcatggtggtgcatgcctgtaatcccagctacttgggaggctgaggcaggagaattgcttgaacccgggaggcagaggttgcggtgagctgagatcgtgccactgcactccagcctgggcaacaggagcgagattccatctcaaaaaaaaaaaaaaaaaaaaaagaattaatatacaggccaggcacggtggctcacacctgtaatcccagcactctgggaggccgaggcaggcggatcacctgagatcaggagttcgagaccagcctggccaacatggtgaaaccccatctctgctaaaaatacaaaattagctgggcatggtagcacacgcatgtaatcccagctacttgggaggctgaggcaggagaatcagttgaacctgggaggtggagattgcagtgagctgagatcatgctattgcactccagcctgggcaacaggagcgagattccatctcaaaaaaaaaaaaaaaaaagaattaatatacaggccaggcacgatggctcacacctgtaatcccagcactctgggaggccgaggcaggcggatcacctgagatcaggagttccagaccagcctggccaacatggtgaaaccccatctctgctaaaaatacaaaattagctgggcatggtagcacacgcatgtaatcccagctacttgggaggctgaggcaggagaatcagttgaacctgggaggtggagattgcagtgagctgagatcatgctattgcactccagcctgggcaacaagagcaaaactccatctcaaaaaaaaaaaaaaaaaaaagatttaatatacaaagaaaataagagataattagatttccttttgtatcacacactatacaagtataagcttggtgattccagaaaccatcttccatcccacatggtgaaagtcacgtgaaagtggggcagtgcacaaagcaaaacagaaccagagttggtgagagagacaaatccctgaaaacattgaacccctggattcagctatgactgaacacatatccaccttgacttccttggctaatagccgataaactccttctgttgcttaagctaatttgatttgtgtttctgtggcttggaacaaaaaagagtcctgacaaatacaagagacttctatgagaaattctacatatgaaggctcttgcactagtttgtattgggatcggcaacaaggtatagatggtcagaagacactggaacactgatagatctgactgtaaggaacataaaaactcagtaactctgattttttagccaacagattagaattcatgcatccatgttctcactcataggtgggaattgaacaatgagaacacatggacacaggaaggggaacatcacactctggggacagttgtggggtggggggaggggggagggatagcattaggagatatacctaatgctaaacaatgagttaatgggtgcagcacaccagcatggcacatgtatacatttgtaactaacctacacattgtgcacatgtaccctagaacttaaagtataataataaaaaaaaagaattcatgcatccaaatgtgtattgattctttcatagtagctaccttgggaaaccaaatatttattccagccatttgacaagaactaagtgaaagggcaagagtttctatggaaaaggcccccaaattagaaggagcatgaggtttagaggcaggtggaaacatgagaatgggaagggtcaatcccagggagaggggatccagggaccatcccacaaagagcaacgaggtctggaactagccaagcgctagcagccagctcattgtccaaggactcttgagaagtggggacctgagcctctgttttgagtcttgtagacctagctttctggggcctaccattccctgcagagggcaaggcctgatgatgagtgaggtggaggagcaaggatgccccttctcatgggaaagctctgagacatgcccagacaccgtgtcccctgagtgctcatgctgctgagaatatgcagagcccacgaaccaacacattaaggtggatttgcttcggaccagaagcatgagtcctggacagcctagagagcccttgaatttcctcccttccctgaagaaatgagtaaggatgctataaatttccttattccattttcaaaagcctcagtgaaaatttgcttcctctctgtgtccatctctttgacatgtatatacacaatggccctgacaagaaaagtccctctcttgtatataagctgccatctctctccgcaccaccccccatgaatgataatacaatatttattaaggcttaaatagcactgttaagtgcacatgttgatttagaatgatggagtgtgtcagcgtacagaacaggaactcagccacagaccagggacccacaaaggacaaggagatatatcattagctaaagacccaagctagcaaatgtcatcagcagagacaaacaagtccttaattagggcttctttatacctactgttaacaccaatttttataagtgtattttcaaaaataatataacattatatatgcaaaaggttaaaacatttaaactgtacacactggtatgaaataaaaagcaaactcccatctgctgtctcccacacaagtcctttaggaaactcttttaagctttttttttagttcttctgataagttaccaccataattctaaacaatatgcatagatttcaattttttggcttatcatgattagataatatcaagtcatttgcactatttaatagaggaggaatttagttcacttgcaatattttcaatcatctctctcgattttgagtttcattatattattgtatttggttcttcgagtagtgacctttttatttttaaataatatacattatcctttatttttgtcccatcttctttccacaatatctcttgtctcatcccaaagtcaaatgaagaaagttgcacctacacttgcccttccccttcctgctcacaacttgaattcccctagcttgggcatcacctacacagtgtcaattgttagacgcacattctagtctataactgccttctgttttgattataaaaattgaaactagcaagcatttagttataactatgtaaatgtgattatgtaattattgatcactatagaaagagtatgatcagacccactgaaaaggaaatatgatcatatatgtcgctagctgactctctctcgaagaatgttcccaggagaaggtcaaatggattctcttttcttacattccatcagttgctcaaaaccaggccacgtttttggtggttttatatttgaaccaaagctttcttctctggtttttccattatttttttctctctggtttttccatttttttccttggcatttcaaattgtgcttcttctttcttgaatagagggggaaaaaaatacacctgtttctttcccactgggatgagattttccagcttcttcattgttctgcctgttaactgatccccattctatgcttgaagtttcattcagagtcttctgacttcatattctgattcgagccgtgtttttagacctgctgtggaagtgtcccccgagattcctttctgtttcacacctagaagcgtggcactgtttcttggaccatggctgcttctttctctcctacatctagatgattggtaaataaagatcctgaattcatccagaatccagcatggctggaaaagtgtttatttcaccttcatatttgattaacaggttggctggatattaaattttagatttaagatcttttcttcctccaataaatttagactataatcttttgaccaggcactacggctcatgcctgtaatcccagcgctttgggaggctgaggcaggaggattgcttgaggccaggagttccagactagcctgtgcaacatagcctgggtctctatgtattagttggttttcatgctgcagataaagacatacccaagactgggcaatttaccaaagaaagaggtttattggacttacggttccacgtggctgggaaggcctcacaatcatggtggaaggcgaggaggagcaagtcacatcttatgtggacaacagcaggaaaagagagggtttgtgcagagaaactcccagttttaaaaccatcagatctcgtgagacccatacactgtcacaagaagagcttgggaaagacccgccaggtccctcccacaacatgtggaaattataggaactacaagatgagatttgggtggggacacagagccaaacaatatcactctacaatttgaaaaaattaataaataaataaatactataattttctgtcctgtgttttgatgggaaatctgaaatcgatcataccctcatccttttttatggatcatctctctctctctatctctctctctcttttcctgtctttctctctctctggatgctgttataatggcaatgtacaatagaaacataacgtgagcaacataagtaatttaaacttttctagtagtcacattaaaaaagtaaaaagaaacaagtgaaattaattttatagtgtatttttatttaacccatttctgtatatccaaaatagtatttcaacttgtaatcactatttttaaagctattatttagatatttcacattacttttctcatcctaagactttgagatccgtgggtgttttactcttgcatcacatctcaatgtggaccagctgcattcaagcactcggtatccacacatgacacctggctactctgttggacaggcccagtccagaatcgtctctttatctctgtggtgcgttgcttcacctacagatatgggtctgttttcattttcttgctcagaaatcagtgcaccttttgaatttgtaatcttgtgtttttctttaattgttaagctcacactacttcaatttatgtgttcatttcctctttcctcctgttctttctctcatcacttgaatgctgaatctcctggaataatattttgtctcttaattttaacttcatgcttttcatcttttcaccattttgctctgtgctctaagagattttatcaaattcatcttcagtcattttattatattttttaattttggcaattatatctttaatttccaattattcttttttgtcttctggagattctttttcatagtagcctgctccttttttttccttctacttctggttccttcttaaacaaaaaattttttgagacaaggtctccctgtgtcacccaggctggagtgcagtggcgtgatcacagctcacggcagttttgaccacctaggctcaagtaatcttccaatttcagcctcccttgtagctgggactacaggaatgcccaagaaatttttttttttttagagatagggtctcactgtgttgcccaggcaggtctcaaactcctggattcaagtgattgtcctgcctcagtctcccaaagttctgggattacgtgtatgagtcactgcacctggccaaaaaaatatttttcaatttacacataataattgtatgtatttatggggtacatagtgatgttgcaatacagtgatcaaattagaataattagcatatccatcatctaaaacacttaacatctttgtgttgggaatattcaatatcatagtagcctgttcttgttttatggatgcaagatcctggatctctctgaggagtctagtaagatttttaaaattctctccattcctgaaatacattttttcattgggttttgttgttcatgttaatgttagtcttctcttgtgtgcaacttgcttccttcattgtctgttgtccttgggttggcaacattgtctactatgcgttcatctgcatgaatgaaacactaagttgactaatatgggaagccatggtgggcttcctccaagaaggtatacatttccacacatgacctcacctcttatctgaattgggatggttgtggtggctgacagtcaactcagctcttgagagctggtacctccttacacccttttccccaacccagggccacaaatttaaaaaggctttatagtaggtgtattagtcagttttcacactgctgtaaagaaatacccatgactgggtaatttataaaggaaaaaggtttaattgactcacagttccacatggctgaggaggcctcacgaaacttacaatcgtggtagaaggcaaagaggaagcaagcgccttcttcacaaggtggcaggagagatatcgtttgaaggaggaactgtcaaacacttataaaaacattagatctcataagaactcactcacttccatgagaacagcatggaggagactgcccccttgatccagtcacctcccaccacgtccccccatcgacacatggggattacagggattacaattcaagatgagatttggatggggacacagagccaaaccatatcagtagggcaccagcatccacacagggagctctagccttctctaggcagctcagttcattcttagatacagctccgttgtgatttattaattgaatctcttacagaaactagaatctctgggctgttgatgctgtccctactttcattcttagtgccattatggatttttcatttttagatgtctttactgtcctttcactgggattttgtgttcatctgccatcttgcactaacggatcaattacctttaagggaactattctgcctcccctaaagccattgttacctataagataatgaacaaggttttgacttttgaattttattttcatgctagaatttctattgctacttgtgtccaaagcacagtgttttacactgacaaatagtgatccatctcaacagaaatttaaacagagcccaggtacatgggtatgttccaattttcctctccagagttctttttttttttttttttttttttgagacgggggtctcactttgtcacccatgctggagtgcagtggtgtaacctcgactcactataacctccaccttccaggttcaagcaattctcctgcctcagcctcctgagtagctggaattacaggtgctcaccaccacacctgactaatttttgtatttttagtagagacggggtttcaccatgttggccaggctggtctcgaactcctgacctcaagtgattcacccacgttggcctcccaaaatgctgggattacaggcatgagccaccgtgcccagcccagagttcttaaattgaaacattttttaatgagatgtgtagagatatggccaactcttgtcttctcccttaataatcagtggtttcgtagaattgagaagtgagggttgttctgtaatgttccatctacaatagagtgggaaaacgctggtctaatggtgaagggaagtggattccagtatctgcatagtcactctcagttctggcgatggcccccaacgctgtgcctcagtcgcctcatctgtaaagagggcataaacactcttcttgcatgtctcatagggctgatacgaagaggaaaagagctgatgtgctgacacatactcagtactcactgagtattcgttcatcgattaaacgaagggttcaaggcaggggtctctcattaaggctgtggctgctctgtggctgaaggccatcagagatgatcaacctccttgccagcagccagcttggcatgcagagtggatcaagctctgccatctctcccagaggtctttccaggatgattttggtggtcactgcaaaagcaaagatatactaatcaccctgatctgaccactgtacattatatatatgacaccatcactatgtatcccataaatatgtataattattatgtgtcaattaaaactttttttagagcaaagatagccctcttcatggccttccccagcttgctggccaccggccttgagaagccaacggtttctcatacgatggaagagaaacaggaacagctgcctatgttaatacaccaggaaggccagggagccgatgggaggctggggattatgaagggcctaatctcatactcttcatgtagacacgggggaccaagtggctctgagagggaaaggatgtgctcagttagtgacagagccaagactagagtgttttgtacttgtgtgtaatcatcacagatgccatcacccaagaccacacctcaccctaaagctccattttgaagcacttcctggagtgggtatctcttcttaccattgcgaagctgggttttgggaaaccgccctaaacccacctcaagcccaagaaggctttgaccccaaatccatacaaacacctgctggaactcacagttggaagagatctcttggagagcatgttccacttgcccagtccccaggccactcttttttacagtgacctccaaagcctctggacccagctgccagctccactcctggctctgaggtcccccctggcaggagcacacatgccacagctttgcaccaaatccccaaagtgcccagcacattccaggctcccactgtctccaagggaccctagggccctggtagaggagggtaatggcaggaagccataatatattaaaacagcagattaaaacaaacaagagcattttggatcgtattacacatcactttcctcacatctgacaacagaaaaaaatcaaaggcggtaaaagacaatcgtagaccataatggtccaataacttggtgataaaagtgcttgtgggagcagcgtgggcgtcggcggctccgggtgcaggaatcaaagccctcttccagatccacagtggtgtattcagaggcattactgcttaagtgctcgtttaagacttcctccaaaatgcagcgcacttgctggagaatcataattaggccccaactgtgggccatattcacacattgtgcatcattcttaaagatgacagaaaaaaaattacccagggctatgtggcatggatagtagatcttttaccattgtcctccatgaaagaaaaaaaaaaaacacttaataatcccctgcctagactcatagctttttgaatactgagcaatatgacttagttttgttttcaaatggaaaaaggaaagctaagaaaacagaaggctgtgagcagtggaactctggggtttattttacagcctatagatgtggtcaaatccataggaaagtggagtgtaaaggatcttccatttatgaggcactgtccaaaccaaagtcagaccaaaattccagaaaaacctcagattgcgttaggcaagagtataccaccccagatctgattaaacatttggaacgtgtcaacttctgaaaaacactttcatttatttatttatttattcatttattttattttattttatttattttttcagacagggtctcactctgttgcccacctggagtgcagtggcagaatcttggctcactgcatcctctgcctcctgggctcaagcaatcctcccacctcagcctcccaagtagctgggactacaggcgcagaacatcacgcccggctaattgttttttgtattttttgtagagacagggtctcaccatgttgtccagactggtcttgaactcctggactcaagcaatctacccatttacttagcatcccaaagtgctggaattacagaagtgagccaccacacccggctgtcatttaatagtctgtatgctgaaaaaaaatgccacaaaaatgtgcagccatttttccatatctcctccccatttccttccctaccttctcaacccaagcccatttccatccctatgttttggctcatgggaaagagctttctaggaattgaaaaacaaatctgcccatgactcacattctccatgccagcctcagtgcctggctcactgctgcctttgcccccagggcaaaggtttcttgggagaacttcgttcaggtcaggtcaggtcagctccccaggaaaacagacctaaacctgaattgaggtcatcctcctcatttttaatctgaacttacctactgctgtcattttttcatctgcttttttcaactgatcccctaccccaaaagtggcatctacttattgttttttgttgttgtttggggtttttcttgtttgtttgttttcatttttgttttgagagggagtcttacggtgtcgcccaggctggagtatagtggtgtaatcttgactcactgcaacctccaccttccagattcaagcaatcttccaacctcagcctcctgagtagctgggactataggcgtgcaccatcacgcccggctgattttttgtgtttttggttgagacaggcttttgccatgttgcctaggctggtcttgaacttctgagctcaaactatccacccccatcagcctcccaaaatgctaggattacaggcatgagccaccatgcccaacctatttatctcattctattcacatagatttatacatgtgatttatagatttatctaaaaataaatagtatattttcatgacaacgctgggtggtcagtgacagattgttatttttcgctttacagattctaaaatctgcactttcataagagcctcatagctaatgaaggaggtatattacaagtcagtgagaaatgaatgaattctttgaatgtgatttggaagaaattggctctcttggtggtgtaaacatctaaatccttatctcacatcataaaataaaataaactgacatattaaaattataatacctgaaaaacatggaaaaccataagaaaatgtagataagtatttaatccttgcattgaaagaagtttctaagtataaaataatgaaggaagtcacaagggaaaggactaacagactacacaaatattgtaaacatctagatgtcaaaaaattaaaagcaaacaataaactgaaaaaatattagccacatacatgacaggcaaaaggttaatattcttactatacaaggcattcatacaaatcaataagaaaaagaaacagaaaaatgggtaaagattatgaatagataatttacaaaagagaaaatacaaatgtttggctaatacacataagaaagctattcagccacaaaaggaatccaaaaaattaaaaataaagtcaccagagatagcttcctgcttatcaaatcagaaaaaaatagaaatattaatagtactggatgctacaaaagtgaagtgagagaagaatataaattatatgacctttctggaaggcagtttgggcaatgtctatcaagaaccttgaaaacactcgtgttttctgacctggtaattcctttttaaggacttcatcctaaaaagtaattagaaatgtgggctaagctgtttgtaaaagataatccttagagagtgagttataccagcaaaataggtgaacaatgtccctcacccagagagtggcttaaattatagtgcatctatataatgaaatatcgcaaagacattaaaattgaaaaataattttagtggcaaggaaaaatacccatgcaatagtgttaaatgacaaatgctgcctgcaaaatagtctatagtatctcaaatatataaatacatgcttaggagaaagaactgtaaagtagtatcaacagtgtttaccagtgagttgaagaatagtacatactttaaaaaatgcttttctaattttttacaataacaggtatttattttataatcagaaaaatagaactgagaaaaccctctttttattttttaatactgatattccatttatgtttttaaattttttattttaaaatatttaactaacaaagattgaatatattcaaggtgtacaatgtgatgatttgatatacgtagacattgtataatgataaccacaatcgaattaattaatacatcaattaccatccatgctgtccattagattttcagcacttggtcatcttataactaaggttgaaccctttgaccctgtctccctgttttctccagcccccaccccctggcaactgctattctactctctgcctcaatgagttcaacttttttaggttccacaaatgcatgagatcatacagtatttgtccttccatatctggcttatttcacttagcacagtgacctccgggttcatccatgttgctgcaaacaagcttctctgttttcaatgaaaaagtttcaaaaaggtaaacatcataatggaactccacatctggtcacataaatccataaccacagttttttctgccctgtgaatttttcattttacagtaaggacaaaacatacaagtacgaagcccacaatactttaaaatcacttctgagttggtcaatatacataattgtaagtatatagttattagtaatcaatcctaattagtgtttctgtgttttgctttgtctatttaatatgatttaatatttaagtgctcatgtgtcagcatagtcaacatgtgtaacttgttgacagtgtggcaatcactgctatgtgttcaccaaacaattccccttccaccctgggcttatagcaagactacatttcccagcctcccttgtagttagatgtggccatgtgactgggttctgactcctagaatgtgggtagaagtaatgttgcctccagacctctggatctggctcatgaaacttcccttgcaatcctctgttctcactctcttccctcatggatctatcagatacagggaggaaatggtggagccactaaacacagaagcctaggtccctgagtgatggcatacagaaacctctctccccaacagacccacattgagttgcaatgtgtgtaagaaataaacttttattgtgctaagccaccaaggtttgtggttatttgttaaagtagttgtcctaccctaagcccaaagacttagctactatcccattgtcttgacagatcgtagtgcttaaccactttcccttcttggatattttcattgtttctaaatgatgccgtgattatctttgaaaaaaattatggtttttcatttgctccctttggcttatgcttatggagtatatttcccaaagtggcattaccaatgcattatctgaggataatgttcatagttcttgttacactactaccagactgctttcaagaaatatcggagcaaatgagtgcagcatccccaatacatggtgtttcccacatctccagcaacactgggttttattatttttagctttgtttgccaatgctgtggcaccaactagaaagtgcttccaaggtcatttacacttgcaatacttagtgagagttcttatactatagagtatgtggcagataacattttgatctacgaacctcaccctacttactcaccctttggtctgccctctgatataggcagccgcagggacgttcacacgcctcgcattagtgaagtgatgacactgcaaaatacagtaaaaggaatcaagctttcacttctgcattacaaaataggcttctggaaactcacagcagagaccatagttttaaggggggaagaagctttctgtatttcaaagcttggcttttgagcataagaagcctcaggcctgaaagactcaaggcatatggttcaggcataaataatagatttggaagaatatgtgatcagtcagagccagacagccctgccccaggctggataaggtttccctggactgaggcagtggagaggtagagaaggaagaagaggcttaaatggtgggtcctgaaggcagaaggctgcgacaggagcagcaagaggcagatggacgctgcatcccctacactgctcatgtccacgtggtacagtggagaaggctgtatgcaaatgccactcattcaggaggggttcctgcacagatgctgtcttgagcactgtggatatggcagtgaatgaaaaagaccaagtccttgcttctgcagaatgatgttctaatgggggaaatagacgtcaacaaacaaataaacaaatacgcaggcagacttcgctacagtgcgcctcacagacattgtgtattttacaaattgaaggtttgtggcaaccctgcatggatcacgtctgtctgggacatctttctgacagcatgtgctcacttcatgattctgtgtcaccttttggtaattctcgtaatactttgagctttttcattattattattgtgtctgttacagtgatctgtgatcagtgatctttgctgttactattataattgtttttgggtaccaccaacagcacccatacaagatggcaaacttaacagatgaatgttatgtgttctgactgtttggactccctatgccctgagacacacaaatattgaaattaggccaatgaatagccctacaatgggctctaagtgttcaagtgaaagtaaaagtcacacaactctcactttaaatcaaaagctgtaagtaattaaacagtgaggaagacacagtgaaagccaagacaggctgaaagcaaagcttcttgtgccagttagtcaagttgaaaatgcgaagaaaaagttcttgaagaaaattaaatgtgccactccagtgaacacacagatgataagaaagcgaaacagccttattactgatgtagagaaagttgtagttggtctggatagaagatccaaccagccacagcattcccttaaaccaaagcctaatccagaacaaggccctaagtctcttcaattctataaacactgagaggagaggacaggagaggagaggagaggagtggaggaggaggaggaggaggagaagaagaagaaggagaaggaggaagaggagaggaagaggagaggaagaggaaggaggaggaggagtaaagaaagaagaaagaagaaggaagaagaaaagaggaagagaagaggagttggaagctagcaaagtttggttcaggaggtttaaggaaaggagccatttccacaaacatcagcacttgaggtaaagcagcaagtgctgatggagaagctgcggcaagttatccagaagatctaaataagattattgatgaaggcagccacactaacagattttcaatgtagatgaaacatccttatgttggaagaagatgccatctaggactttcatagctagagaggataagtcaatgcctggcttcaaggcttcaaaggacagactgactctcgttagggtctaatgcagttggtgactttaagttgaagccaatgctcattttccattctgaaaatcctaggccccttaagaatgatgctaaatctactctccctgtgctctgtaaatgaagcaacaaagcctggctaatagcacatctgcttatagatggtttactgaacattttaatcccactgttgagacctactgctcagaaacaaacaaacaaacaaaaactctttcaaaatattactgctcattgaccatgcatctaagcacccaagagctctgatggagatatacaagaagattaatgtcattttcatgcctgctaacacaaaatctattctggggctcatggatcaaggagtaattttgaccttcaagttgtattatttaagaaatacattttataaggctatataggtgccatagtgattcctctgatggatctgggcaatgtgtgcaactcactttatcataatgtttgctttattgtggaggtctagaactaaacccacaatatctctgagacatgcatatatatatatacacacacgcatatatatatacacacatatatatacacacatatatatatgtgtgtgtgtgtgtgtgcctgtgtgtgatatatatatgtgtgtgtgtatggtgtatgcatatatgtatatgatgtcagtggtgataagtgctctgaagacaaataaaacaggacagagagtggtggatggtggaattattttaaataaggtggtcagagaaggcctttctaaaaacatgatatgtgagcagttgaagtgggaagggagccctgagcatatttgggcatagagcattccaagaagtaagaacagcgagtgcaaaggccgagacagaagtgtgtcttggcatctgccagacctataagaagaccagtgtggctggagcatgtgagacagagggaagaagacggtggaagggagaaagtcagagagacagcagatagacagtggatgggctgtctggacagacaggatggaggcagtcttggttaacacagggcctctctcctcctttcccagcatggtgtctaagtcccagaaggcactgaggggtcaaggcaattagagtagtgtgcccagggggacagtgtttggatgtggttgatggtcctcaaggcctccaccgcatcctcctggctccgcaccactagcctctatgttcactttccactccctacctctgggccttttctaagccacaagcagacagttggctttccccgtacctttgcttgcagggtgccgagcaaagttcggaggagaagttggttcctggatcctggcatccctttttcccctgctttgcatctgtgatggttaatattgtcaacttgattggattgagagatgcaaagtactgttcctgggtatgtctgtgagggtgttgccaaaggagattaacatctgagtcagtgggatgggaaaggcaaacccaccctcagtctgggtgggcaccatctaatcagctgccagcaaggctagaataaaacaggcaggagaagatggaagagcagatttgctgagtcttccagccttcatctttctcctgtgccggatgcttcttgcccccaaacatcagactccaagttcttcagcttttggattatgggacttacaccagtggtttgccaggggctctcgggcctttggccacagactgaaggctgcaccatcagcctgactgaaggctgcaccatcagcttccctacctttgaggttttgggactcagactgatccactgctggcttccttgctcctcaccttgcagacagcctttcataggactttaccatgtgatctcatgagttgattctccttaataaactccctttcagatatatgcatatatcctattagttctgtccctcaaaagaaccctgagtaatgcagcatccttgctcctacttaaggccacactactgctggcttggcccaccatcatgtatatgcaccagtttcaaaatccccacgccttccttgagctcaggaattcaggctgaagtcaactgattatgtgaagaagtaacatgtacattgaaatatgagttaaggccaggcatggtggctaatgcttgtaatcccaacactttaggagttcgaggcaggaggatcacttgaaaccaggagtatgagactagcctgggcaatatagcaggaccccttctcaaaaaaaaaaaaaaattgccaggtgtggtagcacatacctgtggtctcaacttctggggaggctgaggtgggagaatcactcgagtccagaaggttgaagctgcagtgagccatgattgtaccactgcactccagcctgggcaacagagtaagatcctgactctaaaaaaaataaaagaaagaaaagcaaggaatgaaagaaaacaaaagaaaagaaaagaaccctccatggaagttagttgctaagcaagataaatctctaggtgaacatggaagaggagtttttccttttagcagcttcttacctatttctccactctggcaggtgagcgcgcgcgcgcacacacacacacacacactcgcatgcacaccaacacacccctgcatgctccagaagcgcaaggatcaggaatctggtcccagctattgacagatggccactcctgttctaaatgaactgccggcctcggcctccctttcatctcaaaggccatttgccataacctcattcatctgtgcagactgtcaaattctctctcccagacttctcctgtgaccttcattttattctctgctcatgcctgagtgtggcagctgaactggattgattaaagttttagcactgtcttgttttaattcaagagctaaactgagcatttaaatgaactcgcagcaggactgattggcaggcttctggaatctgattaacattcctcctgaggcactcttaccctccttatctctgctctgtgtccgggttggtttctgggtgaaattcactgttggtttaaaatgacatcattggagcaagtgagagtagacgaatgttcacttccatccatccatccatcactggagaccctgggttcattaagcgtgtgccaggcacagtttccctctacatcccataattcatccatgggtctaatgaaccaagatggagtttgtcagtttgccccagtttgactagatgggacaattctttggtgctcagaatcttttatcctatagagagagactgtgaggggaagagagagcaactctcagcacagtgacataaatgtcagtgcacatccattcatcatttctacctacaaacacagtgcccacaagagccgggacactgaacccacaccctttcttctgcaggtcttggtctgattgctatttttcagggaatcacctggcctctccattcagttatcccactgtaattgcctgtggttgctaagacagaggaggaagcatgggaggacaggcctaggcatctatcacccagggctggatcaggcatataacttcataccatgccccctctaaactctcaagggccttctcatccatccatccatccatccatccatccatccactcacccatctgtccatctgtctgtccatccatccatccatctatccattcatatatttaattcagcaagtatttatcacttgccttctatgtaacaggtactgtgccagatgctgggattttttaaaaacatacccaggaggttgttcttattcagggatggtgtgttaggctgttcttgtattactataaaaaaaatacctgtgctgggtaaattataaagaaaagaggtttcattggctcacggttctgcagacagtacagaaatcatggcgcatactgcctgcttctggtgatggcctcaggaagcttctactcatggcagaaggtgaagagagagcaggcatctcacagggtgagaacacgagcaagagagcgagtggggaggtaccacactattttaaacaaccagatctcacatgaattcagagccagaactcactggtcaccaaggggatggcactaagctgttcatgaaggacccgccctcatgaccaaacacctccaccaggccccacctccaaccctggggattacatttcagcaggagatttgaaggggacaaatattcaaacaatatcatacggtaaggccagcagattaggagatgaccacaactgaaaagatagtttgttacttacggttcccaagagaaggggacacaccatgccacaccattcagagccacacagggaggcaccaggtcgagtcaggaggcaggagtgagggaaaagcatgggcaaagtctttccttcatttgtggttctcaagggaaggaacgggcgaggcagggtaagccactgagcaagtttaggattggataggctgaataacgtcagcaggctctgggctatcagggtggtccccagttgaatggtatctggccctagggtgattttgggcagaaggataacgtctagggtttcctaagcctgatgaaaggagccagtttggggaatggacttgggatgagttggtttgcatatcaaaggcatcttgcaggcaagttgtttgctacctgtaggaaatagccaaccctgggaagggtagtcccttcctgggtccacagggccccaagatgtcaaagcatcctaaaatacagaaaacgaaaacgtggttaatacatggggtttcagaaaatgatgtctgcccttaaagacttcacagacttcaaaacaaacaagagtttcatagcatatggcacaagctgtgccagtcacctttggggatgtctgcccagccacaaccttcccattcgtgggaaatacaccccagatctaaaggggtgggctcctcagtggccggccagctttatagtccatggcccatgcccctggcagtggctaattggaccaagatggacacatggtcccaagctcagccaatcagatttcctctcccactaatttgggattgcaattcagagaccggtacacctgtgctggcgggaacagcagctggtaaacacaggagccaggagacagtctgacttcaccgtatgtatatctgtgatctccaaccctgggtgcacagtggagtcactgagagtttttaagaaatactgaggccagagtcccaattcagaccacttcaatcagaatctctgaggatggggcccaggtgtccgagctcctgtcccaagcctgactcactcctcacacccacaaaagtgaactgtcctgggcctgcgtcccccctccaggagcatcacctctggccctgtcccttcatgctgtgtagaagtgacaggactgtgctatgattgttgtggatattccacacacacatagagtcatggagcacagcaacagggagggggcatgcttaaattaacacataacattcgtgcatttgcagggggtgcatatgatcttttgttgcatgtgcagaatgtgtaatgatcaagtcgggatatttagaatctccatcaccttgagcacttatcatttctacgtattgggaacatttcaagtctgctcctttagctattttgaaatatacaattcattgttattaattacaatcaccctactctgctattgcacattagaaattattccttctgtctaactgcacatttgtacccattaaccactctcttcatcccctcctcccccacatacacacaaacacttcccagcctctgataactataattctacttcctaccagagggagcatttttttacccagactggagtgcagtggcactttcttagctcattgcagcctccaactcctggggctaagcaatgctccagcctcagcctcctgagtagctaggactacaggctcaagccaccatatccagctaactttttttaaaaatgtttttgtagagacatggtctcaatatgttgcccaggctggtctcaaactcctggcctgaaagccatcttctgtatttgtccattttcacactgctgataaagacatccccaagactgggaaggaaaagaggtttaattggccttacagtttcacatggctggggaggcctcagaatcatggcaggaggcaaaaggtaattcttacatggcaatggcaagagaaaacgaggaggaagcaaaagtggaaacccctgataaacccatcagatctcatgagacgtattcactatcatgagaatagcataggaaagaccagccccatgattcagttacctccccctgggtccctcccacaacatgtgggaattctgggagatacaattcaagttgagatttggtggggacacagccaaaccatatcagcctcccaaagtgctgggattacaagtgtgagccactgtgcctggtccagggggagcgtgttaaatcagtctcccactcaacttctgataaaatgaatgtccatcaaaagaagatgtgcagtgcacccaagaagtcaatacatcaattaaccaagaaatatttttaggaagagagatgaataagaggaaagacaaggttcctggcctgggggagcgtttagttcagctggagagggctttagatgttgatgtagatatgtacacatataaatatgaatgcacgtggcagtctacttgattaacattagtaaaccaagcatgatacacactggaagaacggcactccatgcgatcagaaaggaaagattcctctgggctgggctagtccaggaagacttcctgaaggtgggggcatttaacctggtcttgtgaagaaaggtgagtttcaaacaggcctatgggccagggtaaccagctctgtaggtgcttgaaggacagccatcctctgcacttggtgtgcagaacaggccccatcagaaggcgttctcagccacagcctcaggctgtgtcctcctccttccccacagagttaattttttatcactcaagcaaaccagagaaactcaaaagcttgaactaataatggtggcccaagtccaagcatgggtacggacccaggtgaggtcctctaacctctcagaaagcaggtatcaggagacaaagggggtgattgggtaactaggggagacaggagacctggactcacccctgcacagatgctacctttcaaagacacaggtgcatcaaacactggaacccagatccactcacagtcaaactctgccccttctttaaaatagctgctctagggagacagagatggagaagagctttgcactcactgctcactcttcccaggagctaagcctaaatactgagggcctggactaagaataaaacttagtcatggctggacgtggtgactcacacctgtaatcgtagcactttgggagaccaaagtgaggggaccgcttgaggccaggagttcgagaccagcctgggcagtatagcgaaacgctgtctctacaaaaaataaaaattcaaaaattagccaggtgtggtagtgcactactggagtctcagatatttgggaggctgaggtgggaggattgcttgagcccaggaggtcaaggttgcagcgagtcatggtagctctgctgtactccagcctgggcaacagagtgagaccctgtctcttaaaaataaaataaaataaaacccagtcattccaaagcaaatgtctttcctctatttccatattcacaaatccctccccagctctagaggaactagccaccccgtgagccgtcttccctctgagtctcttcttctttccctcggctgatcccttcatcctcccattctgcctctctccatctccctatcaggaccccttattcctcagctgcaatcaactcccaagtattcggcctgcaattcctgaacttccacctggcactgctaagctttcaaacccacaacctcgggtctgagtttcaggccaggagtgtccctttctcctgccctttgggggagctcggatttctacccatccacttttaaaacatcccttccctctactcagtttgagaataacatctggggacagatgtgtctgaatcatcccgacttggggcttggtttccccctctgtgcaatagagagtggactgtgccctctctctaaggatgaccgtccgcacacaccccatcctgagtatgagctttttccaggacggcagtttattttcagctgtaggctttcagcgacactggctttgcttctttctgctgccgtgaaagattttccatgccactagggagtataaatgctcctcacatgcatttttgaaagacctcggaaacctctgcataaatcagtagaagttcatttatggtttcagaatattctggctaatttatctggtgtcaaagatcctgagcctgagccttcagtttccaaactgggccctgtagggctctgctgcatttcccttgcatgtttgttttggctggccctgaaattcgacccggccacaaggagacctttatcattatccaaagagatcttccccttcccaatgacacactgttcggaggtttaactccgagccagtgcttcttccccttttaaaaaaccaacagcaaagatagagctcttccttccaagccaccaggtcgcaggtctcagatttcagccttgccctgatgtccttcctgtgagtttgaactccgctgtgccagcatgtaggccctcccaacaccctcctgctggccttacgcgggccagggcaggcagtgtacagaaacagggacccactgatggtgatgcaatgaaaaaaaataacctggcagtcagcatgtttgagctttctggggctgtcttaccagaaatcgctgtagaaacatgtggctgacattgttagcaattagcccagtgtccagccccagaggcgattttacatccttcctggctatggtttgagatttcattgtttgatgctccctgcattttgctctctcagtatttcctctaccctgaatcatgtggccaagccttaaactcctgtcctttgaggacaatcagaatgacacctttagtgtttgtgccttattttatggcctcatgatcttgtgccctttggagttcaaaggtcacatcaggcagcaggccgggaggtttttgatgtgacctttgaaccccagaaaacaaaagaatggaggcccacagagaccatccatctaaaaaatgatcctataaagaatgcaactcaatcagcccagagcatgcaaatcacataacatttttatggagcaccctgctaaatccaaacttacagccagaagaagggacacaaaccccatgatcccaatacataaatcaaagcttgagaaaagcaaagacatgagtttacagctggctaagaatggaaggatttgcaaaatgtgatttatacatttgtttcctcccctcctcccacccagtctacacacaaacacacactcacacacacgctggtcaataccacagcaccacagggaaatccagcattttcctttccaaaggtttgccctgtgctaagtctaccatggacagacatgggagagcaactgaaggccaagagcttcctccctggccaccagaaccatcctcagagacaggcagaaagtccatagggcaggcagccagataaggaagatgaggacttgccatacaggtaaaaggctggccccacaaagaaggccacattctgtagaacagatgtcacctcccctatgacacagattgtccctcaacagtccttaatacctggcacacatgtccccagggcaaaggtcagactaatttctgaattgatgagaaatactgttcaaatagttagagactgagcaggaggtgctcctgtttctcatgactattgaagttttggttttttaaaaaagaaatatttaagtgtgtttctagatgtctagataacatgctgatgctgggtaatagatcttgagaagtctgccaagtatgtctgtagtagcaaatgttcagagaccagaaccgtggagtatgaaaaagagatccccttttaaatgaagattggatttgcaattaaaatgcgtgtcttctttcttttcttttccatttttttttttgtttgttttttgtttgtttgtttgttttttaagacgagatctcactgtgtcacttaggctggagtatagtggcacaatcacggctcactgcagccccgacctcctgggctcatgtagtcctcctgcctcagcctcccaagtagctgggaccacaggtgcatgccaccacatccagctattctttttaatttttttgtagcaatgaggtcttactttgttgcccaggctagtcccgaactcctggcctgaagtgaccctcttgcctcagcctcccaaagtgctgggattacaggtgtgagccactgtgcccggcctttgtgtcttctacagtgaaactgaaaaattgtgtaggtgcatctagatcttcatcatggatgttgcatctggaagaatctctgctctatctcatccaggttcctcctttctttttaactttgcaccagattctaatgtctctgggagctatgaatatatttttaactctgtctgaacagtaccacagctgtgtctaataaaactatgccttcaacagtggcaccccaaagcaatttcagatgaaataagaatcctagaaaggaccctagaaagaaaaaatcctggccttagaattggaagactaactctgtatgaccatggtcaagtcgcttcacctctttgagcccccatttctgaaagttgaatggtcctggtgctttctgagggcctgctctgcacaggtcctgcccaggtgtcgggataacctctatcctgtcagatttaacactgcatgacttctctgtttccaggacgtcttacttagacacaaaagaatgaactaaacagctcctcctctacccccgttctttaactcggggatttcaccacctgtttcctacttaggagaggcaaaatgtaacccagtggacgaagccccattttccaaatgattcctaagcagcaaacatgatgttgaagtgttctgcaaaattctccatgcaattttggaagcccagtctaaggaatatatatgactgctgcttaagctgctcaaaaataagtttaaccagggtctcagagtctttctggcccaagactattgtggctggaaagactaggaaatcatcctggctaatctcgacctctttacacattccacacgtgctctggacaggggctaggggacactcaccagaggtcacagggctaattaggcacagtcaggaccaaagctcaagctcctccagcgccggcgcacactaacagctaccccagtgcacactgggccgtggcactggcttcttacccatctctacaacaaaactgtgggtagatgttactattgcatgtcagagatgaggtgctagagtcctgggaggttcagttacttgcttaaatctcacagctgatacatgaggagccgggattgggctcaggctttgtctgattccgggcctgtacttgtaagcacccacctcagccctgagaccccatctctatgccacagcgtgaagcctcacacacaggagatgatgagtccacagaacctgagtgggaacagtctcagaggaagggaagaagggggcatgcagtgagtttaatggtgcccccctaagagatcctaacacatcctaacccccacaacctctgaatgggacctgttttggagaaggcaactttgcagatgtaattagtttaagtatatcttgaagagatcatcgggattatccaggtgagtcctaacccaaatgacaagcatccttacaaaaaacagaggaggagccgggcacagtggttcacacctgtaatcccagctacttgagaggccaaggtgggaagatcgcttgagcccaggagtgcaaggctgcagtcagctatgataaaaatttaaaaataaaataaaaataaaatcagaagagaagacacagacacaggagagaaggccatgtgaagatggaggcagagatggagccatgcagccacaagccaaagtatgcctggagccacaagaagctggaagacccaaggaagattctttcctggccctgctgatgccttgactttaggctttctgggctccagcattgtgagagaataaatatctcttgttcaagctttgtaggcccgcatagcatgagagtcgttgggtacttaggcttctgaggccaaggcattaggttctgcagaactgaaatctccacactttggtaagaatgggcgctgaatagccccctggcaagtcagccccagccccagctgtgctctttaccattacagagctcctaagaacagaaggccttttgcccattggaacccagttccttactcttagtaagatttggcaattgagccaagacatattctagcctgagtcaaatatctagattgataaattgtccaagtcaggtgtgtgttggggaaagattcttcaatgaaggtttcttgtagatcctaaccctcccaaatacatgttcaatgcaattagatttttaaaacttccatgatatggttaggctttggtcccctcccaaatctcatcttgaattgtaatccccataatccccacagtccccatgtgtcaagggacagaccaggtgaaggtaattgaatcatgggggcagtttcccccatgctgttctcatgatagtgaatgagctgtcattcactatcacgtgaatggctggagatgacctgcttgggagctcaggccacctcaggccacacctggctacactccaggctgaagaaactgataagttccaagcaaaccgaggaaactccccaagcacaagagtcaggagctcttcccccttcacttggcacttctccttcctgccatcttgtgaagaaggtgccttccttccacttcaccttatggcatgattgtaagtttcctgaggtctccccagccatgtcgaactgtgagtcaattaaacctctttcctttataaattacccagtctcaagcagttctttatagcagtatgaaaagagactaatgcattccatttcaatggacattttcagaaacacacttctatgtaaagcaagttccgtagtgcagacttcctgcttgttcccaatgggtccttgggttataagactacaaagacagaggtggctgggcttctttattgaaacttgctggctctgagacagaacattccagcaggcagacaggagatgaggatgcttcatcacttcagcactgatggactgaatgcttcttctctggatcactgtatcctagaagcccagtctgaggatgtgaatagcaacatctacccacagctttattgtaaagatgaatagagttgatgtgtaaaaagccagttctctggactggcgtgcacacacatggaagtagccattattacaggctgggaatggaggaacatgtgcttcagtcttgactgttcctaattagccgtgtgtacctacttttctcatctataaactagaacgagcatctgccctaactaaggggcagattttgagggaatggcacagactacttctcaggctgtaaaatggggacatgaatgtttttaattgtcatccttgacacatgattccagtgttttcaaatattttcctggtaaaacagaggtcagatcctcctttgctcatgctgctgtcagaagcccagacagcactgttctggtggccagagatgacctgcttgggagctcaggccacctcaggccacacctggctacactccaggctgaagaaactggtaagttccaaacacaccgaggaacctgcccaagcacgagagtcaggagctctgcgttacatatgtcatattttttctatctagcccatatttaataaacccaattttttaaaaaagtaattgagtctcaatcctcagaagcaaatcttggaaatatggaaatatttgaagacgcctccaaagtagataaaagaaaaatggagggtttcaaaaatagcagcttatgcaagatttttgataaaatgaaatccccataatataaaattccccataatataaaattccagaatacatagtaagacctctgacaaggaatagagtcagacactgcttccacctatgaatcatgccaagaaataactacctctcattgggtgttgaaaaatccttgtaaatatatagtttggaagaaatataaaagccgtactttcctctgatttcagaataaagactcttcctccatcctctgactcccacaaacttcgggtgcacacacatgcacgtgtgcttacacacgcacacacaaacatacacacacacacacacacaaaatgaaccaagaaaggaaggaaaagagatcaggaatgagagagcccactaatggattggcttaagtatagaacaacatcccatcactgttctagaaaataatcaatcgagcacttaattttaaacataaaagtaagctgccaggagactgttaatagataaccaaatgaattaacagttgtaggtgggatttgaaaccaggtcagattttccaccaagctccaggccctatgcatacaaagggcctcaccagctcgggcacttgatctcacactgtttcaaagtgggatatctccttttagccaatatccctcctcagcgggcttgtcacttcaggggattgttctttgtgcatcttccataaattttataacaccactactttaaaatattgatgggcaacttggccttggcccaggcccacagtgggttagcatggacatgaaaaccttcaggagggcagaaacaggaagaacacattccccgctgccttttcgtaagggacaattgtgtaagtgcggtggttacctgagctggagacctgcccagctttgatggatggctctgccctctgggaggctgctgagagctgtttggggacaggagggcactcaggacacacacaggcaatactgaggtacctatagacctgcaaagggtaagtaaaatccacacataatcccccaagttgttctaacctgaaactcaactttcttaacactcagactttttgcaaagttattgataaataagaaaaaatggctttgtcatgtgtctcttcttcctatgcccatcaatcccattcttcctataaccctatcaaggcaagtgaccaaaaagtaaatggtagcaaggaacagaaagagcaggacaggccgggtgtggtggcttacacttgtaatccaagcactttgggaagctgaggtgggaggatctcctgagcccaggagtttgagtccagtctgggcaacatagggagacatcatctctacagactcacacacacagaattagctggccatggtggtgcatctgtagtcccagtgatgtggtttggatttatgtccctacccaaatctcgtgtagaattggaggaggggcatggtggaaggtaattggataatgggggcagatttaaccttggtgatctcgtgatagtgagtcctcataagatctgatggtttaaaagtatatggcacttctctctcattctctctctcctgccaccatgtgaagaaggtctttgcttctccttcgccttctgctgtgattctaagtttcctgaggccttccagtcatgcttcctgttaagcccgcagaaactgcaagtcaattagacttcttttgactttgactacccagtctcaagtagttctttatagcagtgtgaaaaccaacttatacacctagctacttgggaagctgaggcaggaggatcacttaagcccaggaggtcaaggttgcagagagccaggattgtgtcactgcattccagcctgagtgacagagcaagaccttgtctcaaaaaacaaaaacaaaacaggacaagagaactgatcccctagattcctgccatcacactctcttcataatactcccagaaaaaaactataacaccactaagaacaatacagcaatagtgtgctaaccaaattaatacaagttaataatgactaccatttattgggccttcaacacacatacacacactcatgcacacacatatatctcagacactgcactgtactaaacacattacatatgtgatctcatttcatcctttaaaaaaaaatctgcaagaatagcctttgactcagacaacacacttccaagaacttttcctatggaaatgatcaaggatatgtccaaagattttgtctataaggatatttgtcaaaatcattgtttagtaatatgtcatgacaaataagacatgtccatgagatgttaaatgagcaatacagagtatagaagaaacatatgagtatttttataattttaaagtatgcataaaatatgtggggttagtttcatcaaagtgtcataagttcatgcgtaatttccccttttttatgtatcttactttccacattttaaaataaattttagtaagaaaaatatattttaaaattatgacctaggtgctatgtccaaatattcataggtgttaatgaataatagcccactacagatacaaagccctttctagtctacattctggttttacatgttgtctcagatgattctcacaccatcttttcaggtgggcagagcagatggcttataatgctaaagatttttaagcatacaaaaaataattaaaaggctgggtgcagtgtctcatgcctgtaatcccagcactttgggagacagagacaggaggatcacttgaggccaggagttcgagaccagcctgggtaacatagcgagaccccatctctacaaaaagaaaatttaaaaattagcctggtgtggtggcatgcacctgtagtcccagcaactcaggaaactgaagcaggaggagcccaagagttctaggctgcagtgagttaagttatgatggcaccactgcacaccagcctgggcaacaaaaggagaccccatctgttaaaaaaaaaaaaaaaaagagagagagtaacacatcaaaccaacagcctttccctgtgacccacaggcaggcacactcaggcctctctgaaaagaggctgcccttggctgtggtccacggggtgtctgctccaggctcccaatgttcattgtgggggtgctccaactgccgtgaaaataatctgacttatcactccttgggctccccatactcccattacttcttaggttctgtaggattctgctctgttcactgcaggaagggagcaaggtgggggaacattccagaatacatagtaagacctctgacaagggatagagtcagcaatgtgcaggagctggctcatgctggctcaggaaagccaatctttaacaactcctcccaactctatgatcagtaatgccacgttggtagcttggagccagcagcagtggtagtatttacaccatgaaaatcagcaaatgctacaaatcagggttcctttttctcccagagagcccgttgttaaacgtttatcagcacaccactggatgcagtctcagaaagaaaaattcgtatattcaaatgaaggttaatccctccagacccctgctttaattaagcaggactacagctccacagactaagcagactgtgaaggttgttttaaaataacatattattcagaaaactgtttatgtatttacaaaccttgccaatttgcccactctccatccctccttgaggtctcttgtttccttttgctgtgtttcccccagagtcaaagaaagcccacctaatacagttcttttgtttataaacttgatggacccaaacaatgtttgaaacagcccagctctgagcagggacagaagaatgtcctgctcaccacggcagtgcccagtcttgccccgaagtcagacttcgctgagccgaaagccttgataacgtgtttgcccctgtcctccggcttcccagtcgttgggccgtcttcactggtgcttcctgaacaatctctacgctgcacttgaggacgactcagctgggagtgaaacatgatcaggagataatttggcccagatggctctaatgcaggcaggagcatttggctgtgcatatccttagtctaggggaacccatttaaatttttttgagaagggaatgtaaccaagcagccacacagcctcaaaatgctacctcatgttatacagctgcaatgagatgtctgatcacgctcctggagagacattcggctcttaggaaggtaaagccaggctagcctttgctgctggataccaccacggctcggctcggtacttggcctttgggggattcagaagggatcaggcataaaaccttgaatatattcctagctcctgaggatcaagggattgcagcaaagggtaataccgcaactggaaacaggagaaagcatcgcagaaacacagagtgaaccaggagttcggaagaggcccagggagaggcttgcgggacacaaaacggtgaagtggctgcacagagcagctgtctttatttctgtcgagctctgaggcataggaaggggttagaattcactatttgacacagttttccttttctgtcatgcaattgacaggagaaagatacaaataaaagaagctgcttgtctgcagagtgtagcttcgggaaaagattagtttgcttcaggaaaaataggacccatgcaacccgaggctctagagtatgacggggacacattggtgacagagtctcaccagtgttagtgaaaaggtcggctgccttcaggagccagctggagctctacagctgtgcacacagggttccatctcattctctccagcgtagtcatggacactttaacgtggagccctcccagaggaacagacgggaagagaccactttgttccccactgcctaatcttgagaatgagcaattcatgctcccctaaagtgggtccttacccactgctgcgttggtcttcccctgtgacaagttttcagggccggatgaggtgacaagtaaaacaaaatgtacttttcagacagacctttgtcatcggaaagcttttgtcccttttagccctctggctgaaactgttgattgggaatcactttccatggattctgttagtactacaggcccatgggtttttggtggagacaaatggaatcttactaaaaagacttatacccctagtcactgtgggggtaacttttgctccaaataggcagtgattatagagagagctgcctctctatgtcgtgaatgtggagaataatacaagtatgcaatccatagatatcatttccaccatcccagaaaagttcccttttaggcagcagtgtgctggtaaatggtgactaaccagcaatctgaaaaacagtctatgcatataatgtaggtgtgagagtatgtttactataaattttactaatctaaaagatgtggaatacacaatttacaaataataataaaatacacaatacactttcctacaaattccatatagtcaattcattctcagagaatgcttttgttgatgtttaccaagctctcgcatctgcagccaacctatggttgcaattgatcaacaagtatagttcacacatatcgacattttgtttacattcatgagcaatgcaaatatgaaacaacttctttgtatgccaatacttcacttggataagttgaataatagttttcaaataatggaagactattcaagtgttcaagtgtttgtgaaaatcacagtgtaatggctacagaaacaacttatgtactgtgttattaacgtttttcccatcactttcttaagtctaaataatcaacgacaaaaaaaagggcgaaataattagaaagtaatgaatttagaatgttacctttgtttttaatataacttaatttgaaagatattattttaatgattaacttgaaattttaacaattggttcacaagccaacatgccatgtgcctgtgcaatcaattccatgccatatatacactttttttcagataaggaaaaggtaaaaatacagaatactacatggattatcaaggttaaatctattctttcttaacatgacaggaaagtaaagctttgacccgcaggggagactggagaggggaagttggcctgtctgttcccatttcaggagcaggctaagagtgtgtttctggaaacaaaactgtcagagtgaaggctcacaagaaatcagaaacaggacccagatctctacccaagggcttataacaaaggctcaaagcaggcttttttccaaaaatgtttttaattccaacatccatcttaatggcctactgtagcctaatttagccaatagctgttattctaaaaatggaagctaatgattccagctaaaaacaacgaagccggtactatcacagtatgttgtaagaaactgattatcatggggtgcatttttcacttccttttctctgaagaaaggcttagtaagagtcccacatcaaaagcaaaagcatttctttctctcacgggaccccagaataggaggaatgtgttctctagaggcaaccacctcccagaactactctttggcaagatgcatcagacgcacggagcgatggtctggctgaagggcaccacctgctattgctcatcatattcgtgccattcaacaaatattagcagcatcaatttacttctctgaagcacctgcaggtacccaccacttggctgagtgctatatagctctacacactttatattttgcaaaatacgtgcatatggaaaagaagcacaacatttaaggcaaagatcagataatagccgtattgcacaagtgtctagctggagaaaattgacaaaaaaaatagaaagtttgtaaaatgatcaaaattttagatatgcaggataaatatgttctggggatctaacatacagcatggcgaatgtagttaataatacttcaagtactgtagacagttgtccttctatattggcagggaattggttccaggatcccccacagatactaaaagttatccacactcaggtctccattttgctattaaaaattgagaagctgaataatcttaatttagggcattagtttccgggtgagctcagaattttcttattccagcttgtgacatctcaatgaatttcccatttccacctaacgttaggagccctgttcctgggccaccttcaggattctggcagaaggggtttcaggtgaggtgagaaggttaagaggtgaattggaggttcttggctgatgcacctgtgccttcacgtgcccccgtgcgcacacatagacgttcgcttacagctgccagctttaaattctgccttcccgctgtcgttgggcaaggtggtcctttgccgcatcgacaggagctcatacggcagagcccctaggaatgcaggtgcccccagtcatctacactctgagcagggggcaggtcttgctgctcactccacttggggtatggctgcagcctaatctctcaccctttgtgggtaataataatatactttggataagcacaatggcatcacattgagcaaaggatctcttttacatgccttaagttatggtttcttgaattaaatatggaatttactagaaagattagcccacctcttgcatcagcgtgacctggaggtgagacatggagtcaaaggagattattccggaactttaagatttattgagtaggccggggatggtggctcacgcctgtaatcccaacactttcagaggctgaggcgggtggatcacgaggtcaggaattagagaccagcctgaccaacatggtcaggccccatctctactaaaaatacaaaaattagccgggcatggtggcacacgcctgagtagcccagctactccggaggctgaggcaggatgatcctttgaacccaagaggcggaggttgcagtgagccgagatcgtgccactgtactccagcttgggcaacagagcgagactccatctcaaaaaaaaaaaaaaaaaatttaaggagtgccctgccgggtttcagacttgcacagtggagtgcagtggtgcatggggcctgtagcccctgtgttttggccaatttctcccatttggaatgggaacatttaccaatgtctgtactcccattgtatcttggaagtcactaacttgcttttaatgttacaggctcacaggcagaagggacttgccttgtcttggatgagactttgaacttggacttttgggttaatgctggaatgagttaagactctggaggactgttgtgaaggcatgattggttttgaaatgtaaaaaggacatgtgatttgggaggggccagggtggaatgatatgatttggctctgttccccacccaaatctcatttcaaattgtaatccccataatccccacgtgttgagggagggacctggtggaaggagattggaacatggagacagttcccccatgctgttcttgtgacagccagttctcacgagatctgatggttttataagggggctcttcccctttgcttgctctcactcactgccatgtaagacatctgcttccccttctgccatgattgtcaatttcctaaggcttcctcagaaagccgaaccgagtcaattaaacctctttcctttgtaaatgacccagtctctgtatttcttttcttttttttggttttgggacagggtcttcctctgtcacccaggctggagtgcagtggtgcaatcacacctcactgcaacctcaaactgctgggctcaagcaatcctaccacctcagcctcctaagtagctggaactacaggcatgtgacactacacccagttaatttttactttattttttgtagagtcagggtctccctatgttgcccaggctggtcttgaactcttgggatcaagcaatcctccaaccttggccttccaaagtattggaattacacatgtaaggcacggcacccagcctcacatttaaagggcttttaataatgagttcagggccaggtgcagaggctcatccttgtaatcccagcactttgggagactgaggcaggagaatcccttgagcccaggagttcaagaccagcctggacaacatggcaaaaccccatctctacaaaaaatataaaaaagtagcccagcgtggtgaagcactcctgtagtcccagctacttggaggctgaggtgggaggatcacttgagcccaggaggtggaagtagcagtgagccgagatcgcaccactgccctccagcctgggtgacatagcaagactccatcttaaaaaaaaaaaaaaacaaaacaaaacaatgagttcatttctcctgatacgaagcaaattttgagtgcaaaaatttattgtgatttttaaaaagttaagtagttcaagaatgcatattctttagaagagcactatacatgcagggacctgggctttatcatcaccctggcaagctaaactgcctcatcaacactgtccctgcaaaagtttctgtagaagttgattcatcaattaaaagccagatccgtatatacacagctgaagaaactgccagcagttcattgctaattaccagggcaaacatttgtatttcaaagttgaccaacaggatgacaattctcaaagctctaaaaagattttgtcctaccaaacactagcctaatgtatgaccgttacccatccgtggttagtaacaatcaaaggcaacacttcttacagcaacaaatgccatgagcagtgatctcaataaattcctctttgcctgtcactataaaagccagtctggtcccaactcagtatcaaggacattattccagacagcacagtactgctatcaattcaggtttccttagcaaataagtgcttcagatatactcgcaagggctcctgaattggagttttctgcatcatctccataaaaatattttttcacctctaaagtcatcaaagaattgaagcaggcccttgggaaatatccttaaggggagagagtggctccaaaaataaccttccttccagcaccacaccaccagctcagagaattcacttcacggtgggacggtcactcaaagtctactgtgaacctcatccccaaaaaggtaatggcaaaggctagaggaaaatcctaaacaatcacctatgccttgtatctttctctagaaacacaatctactagtagaaaaaccaatttgaaattttaaaaatgtggatgctactcatgagggctgtcatcaacgtaggaaaactattaactcaagtggatgacatgtttcttttcctgtattaaaaaagctcctcacatttaataattctgatttagatcagttttgatttaacagacagcatgaatcaaacttagctaaaaccttaatgatgttgtaatatttattaacatagccaattctcaatatagaagatttatgaatctcctaatacttccactttataaactggctaaaaaaaaaaaaaaaaagaaacgctcttttgaagaacaaagtttcagggcttggaggaaagagaaagtgatctttacaaattcttcatggaaccaccggggatcttttaatccatttaaatacaaacatagaagatcagactctgatctgacattatttctatatttttagaaacacttttcactcataaatccaaggtgacaatggcattaaatggcattaaaaatatctacaggaaaggactaccacgaaatacaatattatgataacagttattgcattaaagtggttacttttctgtattcttcacatgtcccattgtatcactatacatttttataataaaaaatcgtaaattaagaaagaattcaagcaaagtattgttgactttataaaataattcttaaaacaaatgttcagaaagaaggcattcaactaagatagagaagatgctggatggagaggcttgcaaggtcccgggaggagctccagggtgaagctcatcactagcctttccagcagcactgtccctggagaccagaagcagtgggagccccttccctgtggcaccacggactcccaccaaggcacgtatcatgaacactgtacttgtacacgtttattacccttgggtgtatggggaatctaagagcacctctgaaatccatacttgattcctttttacattgaggaaagtgagattcacacacaaataccaagatgaccaatgaatggtggcctcgctggcaaaagcagccattgcaggtaaccaaattgcctccctagcattctgtaacccatgggcttagggaaagattaagtaacatttctttttcaaattcacttcaaatactcaactgtgttcatttaaaaaacagcaactatatgcacgagactaaacagatctcattcacactgccagcccacagaggggactctccgtaccctttcaggagggttttgggcaataaagccaaaatctgtacttaaataggtgtgtctcataagacaaatttttaactcatttattaaaggtcctgatggacattccaaactagtaacttatacctagagagagaaaatacaaatgcttactgtatagttatataaaaatagaaatccatcaagagtccaatcctcaagaaaccacacaatttgtacccaaaggctgtatatatatcaaggaaggatgacttccttccttgatctctaaataacaccctctccacatcggaggtatctggaggttgggcatttgcctaacgccacggggtccaccggcgggggtcacagctgctggctggtgaagaaggatttagtctccctgcagacaggattgacacagagcggacagctcagggtcagctgcttggaacacagctcgtttgactggatgtgtgaatgcaccaagtcggccagggcctggaagatagacaagaggcaaagacgcatgagaagcacagggtctgctcgtctgccatgccccctcctccagctgcccaggtcagcgctctggcttggggtttcttttcatccgagtggtgagccctttgaaccaaattctacagcatcttcctttcctgagaatcctcagcttacagaaagttaaaacagagatttcaggagatgaaaacctcttaccctacccactaggccttttctctggaaagcaggttttaaatcagacatagttataggtgggtagaaatcagaaaattggggctatctgaaggaaaaaagactgagcagataaggaattcgattttatttttgtaattaattggaactccaaatgttctaatatgtgagaaaaaccaatattctgcaagagtttctcagaggattactctctggtatgttctactaaaacgattgtaacactgtagataccttagagaacaatggatttccattaagagactcagctcttctgatgttttcaactccacactgaatcaaatgagaaaagggaggaaaaacacagatatattttattttcctttttttttcaaagaaactgctacaaaaaaataaatacacacagatacacacacacaattcaaagtctgacttcaactgttcgcagactgctcattaatgaaaaatactcatggggcagggctgtatgttgattctgttatcataaattattcctcaattcttatgtccttccccttccccattaccttcctaaaggtggtttgtttgcaaatcctttttgtggttacacttgatgaaattctcaagcaatttaaatctgtttaccattctttttttattctcttttgctagtgcataattttacagactcttcctaagtagaatgttactgtaaatatagtttcatacttgttttgatcccaagtgccaaaatgaggtaaattaacttatcgactataaaatatgtattggacctacactggaaccaattcagagttgggttttaaaatatattcttttttcttttttttttttttgagatggagtcttgctctgtcacccaggctggagtgcagtggcgcaatctcggctcactgcaacctctgcgtcccgggttcaagggatcatcctgcctcagcctctcaagtagctgagattacaggcatgcaccaccatgcccagctaatttttgtatttttggtagtggcaaggtttcaccatgttggccaggctggtctcgaactcctgacctcaaacgatccacccgcctcagcctcccgaagtgctgggattacaggtgtgagccaccaagtctggcctgaaatatattcttatggagaaaaatctaaaggaaaacaatgggaggattgtttctgtaccatccctgctcccggctccaaaaatatccactgcctaataactgaaaatggtctaattatgatttactcaggtagttaggattcttctctttcccttttcttttgatagcttttcaattacttgatcttttattttttatttattttattttatttatttatttatttattttttgagaggcagtctcagtctgttgcccaggctggagtgcagtagtgcgatctcaactcattgcaacctccacctcccagattcaagtgattttcctgcctcaggctcccaagtagctgggattacaggcacgtaccaccacgcttagctaagttttgtattttagtagagatggggtttcaccatgttggccaggctggactcaaactcctgacctcaggtgatccacctgcctcggattcccaaagtgctgagattacaggtgtgaaccaccacacctggcctcagctacttgatcttttagattagcattaacatcaggagactggcatgggaaaaacgttgagattcagcaaacacatggatctcaactgaagaggctgtattctcaaacttcatataaaagtcagttacaacagaataaccagcgttggtaaagggcattctccaacaatgttgatgggagagtcagcgatacactgactagaaaaatatataccaacactgaaattccatgtgcacctgtagtcccagctactcaggtagctgaggagaggatcacctgagcctgggattttgaggctaaagggagctatgattgtgccactgcaccccagcctggttgacagagccagatttcatctctaagcaaatttataaaatcataataaatttaaaataaaaaaattgatttccaaacatattggtataaactatattttcactgaagttttagcaagttcacaattagccaagctcatagtgagatacagaaggcatctttaaacaaaatccatagacaatgctgcaaccatttcttagccaattacaacttgcctgcaaatcctgtgtcagaaccactgacaagaaacttaggtgctccctaacttcacccatgtctgattgatgtccagcatggaaattcaaattccacggggatcaggtgttggctcaagttctgcccccacccactctctaccctgccctacacctgctgcccagtcccagagagggtgaagtctcctgcaggatggtcctccatctatcatacttggggtgaccagggccagaaactctggcagagagggaggaaagggtttcttgggtcccaacgcttccacacttcccataaaaataaagctatatattggaataggttttaggctggctctcaaaagccaggacatagatgaacaatagtttttctcctccctgaatgacaattcacatctatctcatattacaagacaccaaagatggtatttgttatttcaataatcagattgatcacaacataacagcaaacagctaattaagtgagtgcataaaagaggtcaaggaaatcacatcacacattgcttccatgttcatttcacgctcttcttttaaatgacaatgactcctatatgccttgacactcaacaagaagccatgtaataatagccctgagtaaaggtcatgattaggcaaagaaaagaaattataaaacaataaaatgttttcctttggaattagtgagaagtacatttcttttttcttaaagaaatatagttgttattactttcgagtagcccagtaactcaaactaaacaaaatgatgtcagccacagtgatccctggggcacctggtttaaggaaagcacaggtttcccctcccactgcatggaattaactcaatgtgttgagattattactcagatgaagtattattcaggagaatgaggacaccgtacatgcaaacaaatacagtaaacaatatttctgaatgatacattagttagttgcagaaaaaatttccttttaaaacaagtcatgatgggaaaaaggcagatgggtgcatttacctccttggctaaaacttgagagtactcgatgtccagctcatacagcgtttcaatatggtcactggtaaatgctatcggaaccaagaggatattcttcctccccctctcacaaagccctttgatagattcgtctgtttgaggacccaaccagggcattggaccaacctatgcgaaagatagacgaatgcgtaagtggactatgcctcctgacggtctgtagtacccctgtttgcccccctgggcacacgcactgcccactgcgggcaagagccactctttacacctgcttgaatggattttgatattttcacatggaaacttgaatcctagaagttgcctcaatataaataaataacagtttctgtcattgcagctaaaggtaaaatattaaaccaatggagctccacgagtcacttgatttccccttctatcttactcgcttgcagagttctttctgcccatggtgagcaatcaggttatggaagagcctgaccatgtgtaagagccaaatctaaccattttataactcataaaataaattttaccaataagagctggccgcccgccagtgtggaagccacttaccttggattgccacaccagtcggtaggggttgcagtactccagcctttccatgactttttggacagtggcgcttacctcctgaggatatgggtcgcctctgttgaccacctgcagcagagacacaatgggtgttcagccattaacactgggaaggccccgagagcctctgactatgtgctgacacagtgtgagccctggaacaaagccctccctttctgtctcctgcaccaatgatgatatggtctgagttcaatcaccaaacttccttagttccacttcttcatcagccaaagaaaaacaccgcagtcaatcatctctaaggtccctaagagggtggagaattccatgttccacgttattcatgggggactcacaagatctaactaaagaggatggttctctctccctcatccaatagatgaagaagacacagaaaagctgggcaggatgggaacttctaccctggtggtcatgtgtgtagttgatttcacaacaggaactgaaacagtgctgcatggacaatgtacagaactgctggatttatggtaaaccctggtggaattagaggaggaaagcagcagcacatcactgcaggttacaggcacctccaagagtgtgacctgcaccttccacttcctctctccccactcttcctgcaacaatggacaacaggcaaacactttgtgcacagcaaatgtttcatacatgatcccttgttaatacctttgaaaattttcaatgcaaattttaatgctttaaatatttactgtgtactgactccctagccctcacctggctttattttcttctataacatatattgcctgctaatctaccataccattttcatatgtattatgtttattatcttttctccctactctctgcaaacaaagatttttctctgttttcttcattcccatatcctatgatatggctggaaacagtgcctggaatatagcaggtgctcaataaatattggtgaaatgaaatatactgatagatggggcgcagtggctcacgcctgtaatcccagcactttgggaggctgaggtgggctgatcgcctgaggtcaggagttcgagaccagcctcaccaacatggtgaaaccctgtctgtactaaaaatacaaaaatgagcctggtgtggtggcgcacacctataattccagctactcaggaggctgaggcagaagaatcacttgaactcaggaggcggaagctgcagtgagccgagattgcaccagtgcactccagcctgggtgacagagcaagactccatctcgaaaacaaaaaattatatatatatactgacaaattattttatgattattactactggtctgtttaaaagccatgggaggcataaatgtagatggaatgaaggaaacacaaagttgccattaggacagcaatgtggtaattactacaaacacgatctacccatggatgctaggaaataacaaaatctctgtattgtcttaaagtatctcctccaagatatttttaattacaaagagaaaaatagtaattttaggatggatcaacacagcagacacacccttaaacaagtggccagggatcacatcaccagtagaaaagcacgctggcatcacagacccccgggtgtgaggcacagagcagggccccgcacccctgtgggttcttgccaatgatgcatcaccgcaacctaatcatgagaaaacttcagacgaacccagatggagggacgcaccagaaaacaactgacatcctaaaaatgactcctcagaaatatcaacgtgtggtggggcgtggcgcctcacacctacaatctcagcgctttgggaggctgaggtgggtggatcacctgggcccaggaggtcgagaccagactgggcaacatggtgaaaccctgtctcttcaaaaaatacaaatattagctgggtgtggtggtgtgcacctgtagtcccagtcactcgggaggctgaggtgagaggctcacccaagtctggtaggtcgaggctgcagtgagtcgtgactgcaccacagcacaccagcctgagtgacagagtgagaccctgtctcaaaaaaaaaaaaaaaaaaaaaaaaaagtcaagctgatgaaagacaagccaagtatcaggactgtcacagattggaggatgctgaggaaaccccacagccacacacagtgtgggaccctggactgggtcctgggagagaaaaaggacatttttggaaacacaagtggcatccacatgaagcctggagtgcagttaatagtattgtaccagcgctggtttctcagcgttggtaactgtacagtggttgtgtaagatgttaacactgggagaggctgagtagagggtatatgtactcttttaactctgtactcttttaatcagttttctgtaagtctaaaaatttcttcaaaataaagtttaaaaagttgtcagaagggaacgcaggggaagagaagagtgtgctagatcagtgttctttctcaactctccaatgtcctccccatacctgacttatccttatgacactgtggcatttcccggtcccacaaggacgctccagcagccaaacctggaagcagcgtgctccgtccccaggtgaaagaataaggaagtgaggccacggtcagaggaggcaaggcagcaccggaatccccacatacaaaaatgggtttcagccaggcacggtggctcatgcctgtgatcccagcactttgggaggccaaggtgagtggctcacttgaggttgagaccaacctgggcaacatggggaaaccccgtctctactaaaaatacaaaaaattagccaggcgtggttgcgtgtgcctgtggtcccaggtactcaagaggctgtggcaggagaatcgcttgaacccaggaggtggaggctacggtgagctgtgatcgcatcactgcactccagcctgggcaacagagcaagacccgtctcaaaaaaaaagcaaagcaaatgtgtttgctccaggctggttcaagggcttcccttctggcatctcaggcgaggtctcaccttacataggatgaagtggcaggaggatggacatgtgaaaaggattgcatgacaccagaaaaggaaaagcaaacccattaaaataggcaggcttccagaagagaggaatttatcttcagagcctcctaccgtccacacgaggcccagcagagacgatgagtggaaaatctgcagaggcttggccctagtagccaccagggggcggtaaggcccagttacaagagtggcccagacactgaggctgactccattcccgacattgttaaaacctcaatcacccctgtgaagatgtaattatccacctctctgggttggaaagcactggttttaggatagaatgctagttctgagcagatgaaactggttgcttattccaagcgcttctatatatcatacagtacactagcttgatcattcttgtttccaacaatacaacagctatggcacagattgtagcatctggatgaatagcctagtgtaatatgatgaactaaggaacagccagatcccaacttgatcctctatattcacttgcaaaaatgtggtcctgagtcttagcaaactgcaatggctgcctaacaagtcctgaggacaaaagcatgggattgagagcgcttgtctgaatggagacccccccactcaacacacagaaacatcaagctgagctctgctgacagggcaggcaaaagcagccttctcttaactgtcccacttattagaaagtcttatatatatcttcaagttatcattttaaagaaaagaggagctgggtgtggtggctcacacctgaaatcccagtactttgggaggcctgggcgggtggatcacctaaggtcaggagtttgagaccagcctggccaacatggtgaaacccagtctctactaaaaatacaaaaaattagccaggcatggtggtgggtgcctgtaatcccagctacttgggaggctgaggcaagagaactgcttgagcccatgaggtggaggttgcagtgagccgagactgcaccattgcactccagcctgggtgacacagcaagactctgtttcaaaaaaaagaaaagaggaaaagatctatttacaacattataatttgaattcattgttacgaggttttaagaagtgaggctagttagcaccaagtctgagatttgagaattcattcttgcactgggcttaggacataatggaagctggacccattttacacatttagaaaatgaaatcacccaatcctctatcactaggtcatcccagaaaatgttcttacttacagacatgggcagtgagtgagcagaaaacagaatgaccacctcgcttctcttctcaagtggaaaatggtccagttcctttagaatatgatctgcaaagcactgagtgagtaacaagaaaggaggataaagaggaagggaagaaagaaatggaaggaaaaagaaaataattttaaaatgaagcctacaccaaaaatctcagagcaaccctcaaaaatccgaactctcttttttaaaaaattgcaaacagtccagcctctcagcattggtttatcatcaaaatggatcataacagtttcaggggcctagggaatttgctgggaaacttctaaagctcgctaatggctcactgcaaatgcgcgctgtggatctgcttcccctcgggaaggacagggcacacttccagatggaaaggaaacacagatgggaaggagttgttttaagacctctcatttgctccgttagcaggaaaacagcttacagggtctttctaaagcctccttagtttggctttcaggcataccacattaaatacattagtcaggaatagtagggaaataagaaaatactgctctatttttataacagtttcttctgagcctcatatccccatcaagtcaatttttataaaaaccttcacaacaacagatgacaggtgatacacacccattaaattcacagagccgggaaagatgtggtaaacttaggggcccattcagtcacatctgtggaacttgagaaagaacatggttcctgcctccccctccaaatctctgtccaccagaccagggagctcccttcgtctagccggcactttgattcacgtcgataggtgctgaaataccagaactgaaggggctttctttcgtcttatactttaatcattctctgtcatttagcttataaaaaaatgctacaaaagacacaaatgggtcaactgacaaaatcagaatatgaatgtaaattaagtaaaagtttaaatattgacgttaaatttactgaagttgaatgttgtattgtggttatgtaagagaatattcctgattttagaaaacacacttaagtgtttaggtgtagaggatggtgatatatgcataacttattctcaaatgggtcagaaaaagaaatcatgtttatacaaacacagacacacacacatacatacacacacacggggcgtgtaaatgataaagcaagtgggatatacatgttaataacacatcaataggccagacgcagtggctcacgccagtaatcccagcactttgggaggccaaggttggacgactgctggagcccagaagttcaagactagcctgagcaacatggaaagacctaatctccacaacatttttaaaaattagcagggtgtgatggcacctgcctgtggtcccagctactcagcaggctgaggcgggaggatcacctgggcccagaaggttaaggttgcagtgagctatgatcgttccactcaactccagcctgggcaacagagtgaaaccctgcctcaaaataataataatacagtaatataggtaaaagagtagatgagagttccttatactattcttaatcttgtaacttttctgcatatctaaaattatttctaaatggtcctttgtaactttttaaaaattataaaggacaatttatcagaaacatgtaaatctgcacttgttggtattttgatacatcagtggtcagtgaaaactatgggataagcaaactattccctaataaatattgagatattattaatctttccagaactctcaaaatttggtaaataaatatcctaaggcataaaatggtacctaaagttaagttcccttttcagaatttataatgtaaattctcagcaaatgtgacaggattagatacaaacgaaaccaatattttctggtctttgcagtgtttggaaactaaagatgctcagaaaggattatttttggacctcagcctagataaggaggcccactgcaaggtttatacaggagcctagaagataaatttgctccaattaacccaacagctaaataaataccaatattagagaaaacagtaataaaatggctatttggagcaattactacctatgccaagcagaaatgtggattcaaaacagaatttgtagttttaaactatatttttcattttagtttagggttttgttttctggtttccaaaaatgtcatatcgtatccaaagcctagtgtttttcttttctcggcttgcaaagctgcaagtaaaaacacaaatcatatggcttgcaacagcctctaagccatcttcaaaactgaggcgccatgggcaaggagaagtgctatttaaatcacctaaaacccatctgcggtattttctactcccaacctctctgcagaatgaaagaggcaccgagcctctcagagccttcaatcacaccatctaggagggcagataaatgcctctaaaattccctttcattttatgaacagagacttcctcagttaagagacctttccatcgttttgcttccctccttttcaaagggctgaattttaatgcaaatctaattactcacttgatcagggcaggcagatgctgtgcagatccctccattccctgctaccacatgtcaatgctgacctgaaacccccctcctttccaatcgcaggcctcccaaagcaaaacccaggctgctggtgcttcaggcagtactggctggacccagcaacacagccatcaatggtgcacacagagaccacaactacacccacccctaagggtaagctccttcttttcagtttttacttaaaattggatttcaacccaagtgttaaccctttacatgcctaaggaacactgctctggggagagctggcctgatttcaatgatgtctagcaccatctagtggtcacagatttaaatgacaccaggcttctaaagaagttgttagtagggttttttgccgggagtcagaaaacgttcaaggagtgaaaaataaaatggatcaaatctaaatgacttaatatttcccctacctaaaataactcaaaagcagaaacttctactagcagaacaaaattatatttgcataatttagggcaatattttaccaattgccctcccatatttgacaggcagaaaagaatatggtaacatcagttcaaagctattaactttagaactgtaattttaacttattctcctaaaatcaagcatctgttaataaaaatattataaatataaattgcatagaagaaatatgaaatttcttttaatatgtgaaactttctcaatcgaaatgttcaatttattttcatgtctcagaacatgtagatatattacttttacattattaaaatcgtttgacattttaaaggatttagaaagtagaaaatttaattcgttggtcagtcactcaacctacaaatgtaagttagctgaaacaccatgcacaatctttaatgctcttctggtcataggaaacacaaaactcaaaatatcgttttgttatggtttgggactaatagcattaatctgaagaaagaagagtctagtcattttaatctttaaatgtattttctcttttcataataaatcaagaatataatacttttatttaatcccaaacacacaatttaagcaagggaacagtaaggctcagaaggacatccacaaacccagaagggatgagaagctgattcacactagatgctggggtgacaggcagctggcaagcactggcttacctggatgaggaggtgatgtgtgggccacctgtcaatagtgctccacttcatcgtgggcttccgtcccacttgattatagtatctgtaaatggcatttaagctgctgcctgaaatatacagagaccacttagtagatgcattttgattatggtgaaaataaaaaacagactcgtaaaggtagtatatataagttcaaagcaggtaactgcttctttactgaatcagtctaattacaatcatttcaatactctaaaatgcatatagatttaactaccctgcaaatgaagatcactaaaaagcaatcaatttcaatggactttcaaagattattgatgtcagttctagtgaaaaacaagatggccgtaaagttatgaaatataagcagtcatatttacagggaccaagtcttacaattcaaagtatgtcggccaggcacggtggctcacgcctgtaatcccagcactttgggaggccaaggctggtggatcacctgaggttgggagtttgacaccagcctgaccaacgtggagaaaccctatctctactaaaaaatacaaaattagccaggcatggtggtgcacctgtaatcccagctactcaggaggctgaggtaggagaatcgcttgaacccaggaggtggaggttatggtgagctgagatcgtgccattgcactccagcctgggcaacaagagcgaaactccgtcccaaaaaaaaaaaaaaaaaaaaaaaagtatgttattttttttccagttacaaaggttatcaatcccattataggaaatgtatgcgatggggaagaaaggaaaaaagaaactgaccattatcccagcatgctaattacagtcattgctttactctaatatggttctttttttctttatagatgttttgttttacaaagttgtaatttttaatacatatgcaattctgcatgctgagtattttgagcatctttacttaatattatgaaataaatattttccatgttatgataaaagctttgtaactattgtttgtttgtgagatggagttttgctcttgttgcccaggctggagtgcagtggcgcgatctcagcttaccgcaacctccaactcttgggttcaagtgattctcctgcctcagcctcccaagtagctgggattacaggtatatgccactacgcctggctaattttttacttttagtagagacggggtttctccatgttggtcaggctggtctcaaactcccaacctcaggtgatctgcccgcctgggcctcccaaagtgctgggattacaggggtgagccaccgcgcccagcataactattgttattaatggcctcatgataaggagagaaaattattgaagtttctgtgagttctcattccctagaataagctaaatggacaccaaatccttataagtaatctaataaacttatatttctaagagagagatggaaatcatgaaaactcaaagcctaaaggaaggcagatggtgtcaacccaatgtaactttttcctgtctaggggagttagcattggggtcacacctgaatcctatgaaaccaagtctaacacacagcctcttcctcagtcttaacatagggcaagtcccaaaacatttccatgctttccatcaccgatccactgggctctctaactataagaactattagttaggtttccagttgaaaatggtagtcaggagagagcatatcttaaatcacatatactctcagactaagactcaacttccaaaaagataaacaggttcaattttggtgagtagaatacagtgaatcagaagaattcaaagggactccattcaaggttcagaaacaatctctccagaaatcaaaaagttgtcacgaccatattcacgttacagaccgcacttcacaggtggatatcattttcatatgtgcaagggggcatctggaagctacattagctctttcaggttgtgtggaaacattcaacaaacaacccaaagaagtcattaaggagaaaatgtgactgagaaatgtgtttgtgataaagacacacactggctctgccacaatagtgccagtctaaaagatacaacagataaacagcatttgagtggcctcgaagaattaacgtacttcgcaaagccttccacaacttggatagacggatgtacctgtccttacatgagatacattcaagaaaaactaagcatacagtgaagttttgcatacactgtcacttggtagagccagccctgaaataaaaaccatagtcaatcttctgtcatgtaaataacaatcttcttaatttatctaattgtgagagcagccatttacatattgaggtatatttcttaaaacaaggcaaaagtagagcttaaaaattcataaaatctgactccttctccagtaacatatgaccagacattttgaagttgtagtggtgcatttccaaaagaaaaataataattcaggctgagtgcggtggctcacgcctgtaatcccagtgctttaggaggctgaggtgggtggatcatttgcggccaggattttgagaccagcctggccaacatggtgaaaccccatctctaccaaaaatacacaaattagccgagcgtggtggcacatgcctgcaatcccagctactcaggaggctgaggcaggagaatcacttgaacccgggagatggaggttgcaatgacagagcaagataccatctcagaaaaaaaaaaaaaaagaaagaaatgataattcaaactcttgagggtatcttagaactcaggcattttaatgggttctctgaacaaatatttaaggcacataacaagctttgactttttccaatagccttttgattctccttatggttatagaagtgataaacattaatatccaaaagcaatttgggactaagaatgtgctgacttcaatccttgcaatggaatgcaaacaaatgtgtctgtgggtgacagtagcagctttgcctacaatgaatgatacagagattgccaaacaccaattattccccagctccagttaaatatacagaaaacgacaagcagtaacattttccaaaatcaagaaaacagaaaattctgcaaagggaaccccaaactgggctttagttttaccagcaaccaactcataactgaagcaaaacaacgacaacagcaacaaaatatcagtatttcccatgttgtatgggcatctttgctttcaaaatgagaacagttacaatctttgctacatcagtaagaaaatctgggtagccataaaaaggtttatcacacaaacccagaaagagccttaaggttcattactgatccattacacaatggcattaaagcactgaacactgacagccactgcctaccacccacaccatttgtaattaccagccaagtggccaataattcaagggacagatggaccatgagatttcaaatggactgacctgaactctcgtgtttaaagaagacaggttgaatttgccattcaaattgcaaataattcatccttcccttcagtacttagactccttggttatttttgccagcaccgtatctacctttccactgtcagagagatgcccttacctgtggtggagcagctgtactgtggatactgtgtgaaagcaatagccctttctaggccatctctctccatctcttcaattgcttcttctgttaaaggatggacgtaccgaaatccaatatagtatttgtgaggggctattaggaagcacatgtggaaaggagaaagtgttaatccttatatagattcctcagagtcaacaaacataatgcaatgcccagaacaaagaacagttcatgtaatttcctatggcactgacggtgaaggcaagtttagcatattccttggatcttatccactcttcagctggtatgtgaacttttaatgatgactttctaggatcagtaccccacccacacacctttactgcacagtggtttttaaaactcaaacttctcttcctaattctctgttcttggctggcataagagagcctcaagagaaaggaggaaaaaacaacacttattctaaaatataacttcctcttgcataccagatactatggtagccactgggcattatttttttaatcatttaaacctgattttccagataaggaaacagagactctgaaggttaactgaactacccaaagtcataccttgcaggtggtcgagctggaattagagcctgggtctcccaacccatgcttctcactcctcccaggccccccacctcaccctgctcctattacccagttccccgaacccccaggccacctcgtttatataaaaaaatgcaagagctcttgcatacgtaaaaaaattcattgataacaaatgattaaaatgattctcctcattacacatataaaacagtgcttactttggaggtgccacatgggattgaaagccattgttcttggtacctaaatggcccatgcctgctgtatatcctcatgttctttccctgtcccttccctgtcctttcacgaataccctcttctatcttctttatcctcccgcatcttcctttcttgtagttcaaaaacatccacaccacataattgtttaagcatgtataaagtcataaaactacaagtttcctaaacttacttagtcttgtttccttgccttttcataggattacacataacttacactcagggatgatagtgagaatcactacatgagtgtcaggtaataaataataagaccatgataatgttactgtccaaagcattagcaggggctgcaactatgaatgtgacataaattgccacaagaaacatttaggttaaagtgaaggaaaagacgggagtttatctcatttatacctagatatatacaaggacgacattcctcctaacttgacccagagagctaagagccaggggaacacattcccaagggagaagcagaatgccattaggcgagagaagcacatgtgtgcacagaaaggctggtcggactcagtattctctggttgggtactgcaaaaaagaagaaggaagtaaaactagatcatttttagcgctctgtccattttccggccaccaatttcgtgctgccttgcataaaatggtcactagcagttaaaacatatcacaggacatgatcccataagcaaactccaaatgactgattgttcaaagattatgtgctttgtgctaaaaaccgccaactattacaataccatcaaatcccttgaagcaactcttggtgatttgagctgaggtttagcaagcaagtagaaactgctttcgattctactttgaaacaatacgatgatcagaatgacatccccagtgctgcaggtcaaccggcttctcgcattttcttttcacctgtccagtatctgaaggttacggtctaaatgcctagggtctgggagttcctcaaatcatgcatactaagaggtagaaaggctgcccttgcagataaagacaagggcaggtggccacattttaaagtgagacagagtaaaataccctggaaagaactgataatgttttctaaatgctttctaaagacaacctgtaaacacatattggagaaaaagcagcaaggtactctccaactgggcatatcctgaggaaccaacaaacagtgttcatgaaggacccgtgtccatcagggtgggtttcacaatgcagctggctgtccctggaaggatgcagggatgagaaggagcctctccgatgttaaccagtgccacatctcgtgggcagatctggccagagtgagcccaaaacacatcactcactggcctagcttacgtaccctcagagcagctgttcaatgaacagtcttcagcaagaactactaaaagacagagaaactagatttttaaacagcaaaaacttcattaatttagcatgtacaatagttcaaatgtccgatttgtacatgattttttgaaagaaaagtttgaaatatgtagcaaatgcttactttgtatcagatcatgaaccctgtgccaatgatgaattaaaaagctcacgtatattgaacttttgtcatgttaatgcctctcaggattatcgcatttaattttcacaaggatctaagagttgagttctgttaccatccccattttctagctgaggcttagttaagtaagtaaactgcctgaaccagagcagggaagccaacaccatcagagaaaggaacccatacgcctatccacgctgcatccgggaaagaacagaattatttcatgagcatcccttacttatagcttcactaaaagcagttacaagctaaacagttaaactataatttgcaaagcatatttgagatttagactttccatcacatgattacacttctcatctatttctgtatctattctctacatttctgcaatgcaatgtaactacatgaaaccatttcctgatataactcactgtcttagttaactggtcaattctatgaaaccagtgcaagtctcaaaacgtccacactggctaccaagcaacaaccacttccctaaaaaacgacagcatgaaacatgtttatctgtttgcaatcatcacattttctggcctaaagagaatttttcttaatagaaataaatcaatagacatagttcaaaagtaaactttacaactatataggaaagaaaggatcagaagggaagaggaatgagaaggagatgaagaggtaccccagcagcctcaccggagacaggaggtggcgggaaggatgccctcctgtctgtattgctttttcaagtctgacaactctaccagggctttaactcctgggctcaagcaatccttctgcttcagcctcccaaactgctggggtgtgccccacccccatgctcactagggctctttataatgatgggtactacagtaacataaaaacaggaaaaatgggaacctttctgcctcctcttcccacgagagacagcatagcaattgcaaatctggttcataataaaaccttttttttttttttgagacagggtctcactttgtttcccaggctggaatgcaatggcatgatcatggctcactgcagcttcaacctccctggctcaagcgatccttccacctcagcctcacaaatagctgggcctacaggcgtgtgccaccatgtctgactagttgttgttgctgttgttgttgttgttgttgtcgtgtgtgtgtgtgtgtgtgtgtgtgtgtgtgtgtgtgtgtgtgtgtagacagagtttcaccatgttgctcaggctggtctcaaactcctgggctcaagcgatccacctgccttggcctcccaaagtgctgggattacaggcgtgagccaccacaccaggcccacaagaaacctctgatcatgataaactgttaatgactggagtttgttctctagtaagtaggtgtgaatggagggctgacattttaaagatgcactgtggcatgcacggaggaactgcataagaaatgcccttgagccacagctttaagcaggaagcaagccgaatatgcagaagcacagttgaacaattttcgaagtgaggtgatctgagaaggggccagggccctttgttactttgtgccatgggaaccagtggattctgagaacagctggagtggatgcttgctcagtgatgtcagaaaagagtgaaatgctccttttggtcctgcctagtggagctgttctccctgagggttcccagtgtcacacacctatcctgatcccaaagctctaagatatatttgcaatgaatgtaattcatgtgtcctaagatgtacatttttttggttttaacatttctcatatcagttcagtctacaatagatgttgtcttaaaattaaccggtagtgcttttgtatcttagtattatacaaaaacagggtgtcctgcaatgaattgtgtcttcgatgtgtttaatacagcatttttacttcatccatgcatttagtggttcattctgcacactattattctggatagaggttctcagatgtgcacaatcctctttttggtgccacgtccaacaaggaccttcaataccttacaatggtgatattctgagagctgaaagcatcactgcgagttgcttactgtcctgtggcttccatgatagctagctaatactgctctaaatattctaatcagctatccaaccagaaagaaaaggcaataatagcagcagcctcaatccatttcccaaagatttctttccagtgtaatgatatatgcatctttctttcatggtatgttgcttatgccttatactctagcaatttaacaaacatctcgaacttccttttgaaactcatgtcccaaatccttagcttttttttacttgtaatgtaagaagtcatagcaaaggctaaaggtcaagggataacgcctggagacctaaattaagtgaccatgtattatgtagaaacaccacaaattgagttgccagtacatatgaagcatttagcatctactactcttttgaatttcataactacttcgaaagaactaatctagttacatgttaatgaagaaacaccatacctgtgttgggggacaattcatccagcagcttcaccatgccctctccctgcttggaagtccatatcttgatgggggatccgcctccaatcctgcggtactgctcttgaatcttgggggttcggcgtttggcgatgaatggtgccagcttactaaatcatttaacatacaggtaagtggattttattccagcttagcaacctgagaaatgttttctactcaataaaaaagaaaaaaagcaaaattttagagagcctaacaagattaagcctttaaaacagaagcttgaggtcattgacaatagccagctctcttgttgtagaataaggagctaaagctataccctctctgaggaatacccagctgtgctccacaagctgttccagcagcacacctgaagattcaggacacacaacacccatgcagagaaacctggatgtgcgctagctactagcgtaacacattttgatcccacacctaacgagaactaggatataagacaaatgaagtagacatttctcttaatttaaaaaataaagtctattaatcttatagatacacttgcatataggagcaaagatgtatgcacaagaatgttcactgcaacactgtaaacaaactaattgtccaccatgaagcatggattaaacaaattaagttacagccatatgatgcagttctaaatagtaatcaaaaaatgagccagacctatatatcgatataacgttatgaaacaagatacagtgttaagtttacacattcacaacagcaaagacttggaaccaacccaaatgtccatcaatgatagactggattaagaaaatgtggaatactaatgcagccataaaaagggatgagttcatgtcctttgtagggacatggatgaagctggaaaccaccattctcagcaaactatcacaaggacaaaaaaccaaacaccgcatgttctcactcataggtgggaattgaacaatgagaacacttggacacaggaaggggaacatcacacaccagggcctatcgtggagtggggggagaggggagggatagcattaggagatatacctaatgtaaatgacgagttaatgggtgcagcacaccaacatggcacatgtatacgtatgtaaaaaaaaaaaaaaaaaaaaaaaaggaaagtttcaaatatagtacataagtaccttcacatttgtgtaacgaagtgggggggggggtgtgcatgtgtgtatgtatgtatgtgcgcgtgtgtgtgtgtatgtatgtgtatgcttggatatgcacggactatttctggatgtaacagcgctttcctccaggtggataactgggagtgcaaggtgaaagggacacttgccttttactgtaattacttttatactatttgtagtttttatcccatgcatgtactaatttttcataatagaaatctattttgaaagaaaaaggagagaaggaagaagggaaagaaggatgaaaggaaaagaagggcagcaacaatccatatttatagtacaaatgaataataatcattgcttccctgagtgttaatcagccgttaagtgacaagtacaaatatatctttaaaaatctttaaaggtacctaggctatgtcaagacaactgcaatttccagggctctggggagcaaagggctcaaggagaatccccactaacttatttgctctctccccctgcaattttctgatatcatatccttctgatatccaacagaaaacaatgctgctgtttaaccattaccagatacgcattaaaactatttactggtttgaaactacagaattgagagacacatgtcaatgtagtgccaaggttataattgaggtgtttatatatatctcacttctgaataggaagtgtcatgaggtctcggtccaagaagagtctcagaaggaagtcgtgaacatctccaagagtttcagggcctcccatgtttagcattaatattccagttttcggcttcctatataaaataaaatacaacggttgatttgtcacacttcttattttcttccagggtggactcttggttcagccagcaaactctaatctgttccatacaaaggtaaatactatggctcttttcactgccgtcacacagatacctattcggggacatctgtggcctccagttccccatggtcccagctcagacttggacctttgtcttttggcttaattcatgatatcagtcttcactccgctagaaatgtttcccttttaaagtctcggcctgaagagagatcgaacctttagggactgggagtcaaggtagaaatctaaaattgtcctgcagctaaagcacctgtacatgtgagtaccatatgaatacagaggttacctgacctctcccaacttcaagtttcctcatctggaaaacatagcacccaccacctactcaaaatgctgttttgagaattcagtgggtaacatcttcagtcacttagcacgtgctggcacatggtaagttctactctacacagagcagggttcccccaaaattttaaacctccacagtctaataccagcccatccccactcttgcatctgctcctgtctctttagtcaattattaaattaaatgactactgactgaaattagtttttacattttatttttgaaatggattctcactctgtcacccaggctggagtgcagtggtgcaatctcagctcgctgcaacctccgccttccaggtttaagcaattctcctgcctcggcctcccaagtagctgggattacacgcacccaggctaatttttgtatttttagtagagatggtgtttcgccatgttggccaggctggtctcaaaatcctgacgtcaggagcctgcctcggcctcccaaagtgctgggattacaggtgtgagccaccacaccaggactgacttaagttattgcttgctcctctgcttccttctccaagacctccctctattccttcatccatggctcctgttatgataaacttctcctctccatcctgcatgtaaattcactgtgtagataattcctgcaagaaccggtgctaacattcaaattagtcccaggctacagaatcaacccctgaataagcaggaagaagcaaaaagaaagcagagctccataacaagttttaggtcaagcagcttctggaaacttaaaaaaacaaagtgctatgcaaaaatgtaaacctaaaatccagatcaagctccggagtcaacacagcccaaagtgagccaggccaggagctccccactcctaagccccgccagagggcaaggtgaagtcggagcaggaccaggtgcctctggcacgctggcaggagccaccagaagaccttgcgtgtccccatgagcaggtagccatgggatggcaataactggggaactaaagatcaaggagcatttcttccattcattcattcatctttttttcatatttaaaaattgagatataactcacataccacaaaattcaccataatctgaacaattcagaggtttctaatacataaggaaaggcaggaaaccatcacgactatctaactccaggacatctttaccccacaaagaatcttcgtatccattaaagccactccctgttccctcccctctcacccctggcaaccagtaatctactttctgggtctatagatttgcctattcaggacacttcatagaaatggaatcacatgattgtgtctggttttactcagcataaaatgttcatgattgtgtctggttttactcagcataaaatgttcatgctacgtgtcgtagcatgaatcagtacacttcactcctctttattgctaaataatatttcattatatggttataccctctattcactttcaataaagcagctgaaaaataaccagcctgaagtttatctaaacaccgttattatgaacgctgaggggtctacttcctgaatctcctacaccagactacctctgaccactgcagtgactaaaccaatgctgctgagacagagcctgtatagagaaacattctttatgtgctcgaaaactaaagatactatgatgacatcttttttgtttttgtttttttttgagacagggtctcactctgtcacccaggctggagtgcagttgcacaaacaaagctcactgcatcctcgacctcccgggctcaagtgatcctcccgcttcggcctcctgagtagctgggaccacaggcacatgcctccatgcctggctacttttaaaattttttatatagacagagtctcgccatgtggccccgactggtctcaaactcctggctcaggctcccaaagtgctgagattacaggtgtgagccattgccccaggcttatggtgacatcttaatgggcaatttttaaacaattattaacaacatttggcaataacgtaaggcagcagggtatgtcaaatgtaaacaggtagaaactgttttcttgatcaaacctgttgtataagtggatgaggtaaaaatctgaattctcaacctactttttcagaatacgaatcaattcctggggaaggagaaatatggcattacaatgagatcagggattttctcatttagaccccattataaagattaactaaggtcccttttcacatcaatgccttcaaccggggtttttcaacctcagcactactgacgtttggggctggagagtcctttgttgtagaggacggccctgtgcaatgcaggagccttggcagcatacctggcctctacctgtacacaataatagcacacaccccaccccagtgtgacaaccaaaaatgtctccagccattgccaaatttgtcccaggaggcaaaaatgcccccttccccctattgagaatcactgtcttagagaaagagggcttaatccccttctaaaacaaccaagcaactgcactgaagatgtggttgttatataactcttccatgctcgagtcctacaactgcattaacgggtgtgttgagttttctttccttgatatttgaaaattccagatgcattattttgtgaaactaatattcgtttaatctttctacttagaccactagtcttctcctgggatcctgtctttcaccttcaaaatctgtgactcacaataaattaagtgcattttcccatggattgctgccagttaacagattactggttaaaaaaacctcaggctaaaagacttacctaagccacagacggtatcagtgtgcaaacgggatttagagctgtttttcatctataacacctgagctcagaacaagagtggctttaaaggggatgctactctgccctgctcatggttttgcaaacgcatgttgatcttacacatgaaagagatgcacacgacttgaaaatacctaaatacacatgcacttaattcaaaactgtgttgtgcatgatgaatagcgcattagtaagccccagtctgacacccctctattccagaatgtgaagtgaaagctttagtcaagggtctccatctcctctccctccagacagaacacacctgagaccaaggtctgaacgttcatgttccgtttgtttgaatataaaagtgtatacagcaaaatatatttaaaacttctcacttggaaaggtttcaacattttgccatttttatatcccaggactctcaaaatacaaggtttttccgtgaaatattaaatgtacgtaacagaaacttaagcttgtcaattaataaacaataattctattctactctatatggtcagcctcaagaaaaagtaatacgatcccagctcttcattaaacctctaagacatgattggcctgtgggtctatgatgcctctagaacagaatttggtgaactatagcccatgcactaaatctgtatacacacatacacccctactgcctgtttttgtaaataaagttttactggaacacagctcccctcattgtttatgtaatatctatggctgctctcacactacaacagcggagttgaatagcagcaaaagacagagtttggcctacaaagcctgaaaaatttactacctaaccctttacagaactaatgtcaacccctggcctagtgtagtgtctactctagtattgcagtctagtccagcccaagcattaagcagcacaatgccttcataatgactgccatcagaagaatccacaaagacactcactgcttcaccatttctaatattaaaaaactagaaatcacctacgtgtcccagaatgttggtcaaggtagtttatgacttaataaaatactcttcagttactaaaataatatagacaagtatttatgatgataaagtaaataaaaagagggcattataaatatatgatgtacagtacggtcacatcttgctaaatacatacagagtgaatatttaatagtcatacagacaaaattggcctggctggtcgctcacacctgtaatcccagcactctgggaggttgaggcaggaggactgcttgaccccaagagttcaagacaagcctgagcaacacagtaagacctcgtctctattttttttttaagaagacagagagagacaaaatattgggtggtaagattattcataatgttttaaggttttttttgttgcctatccgtattctctaaaatgatcccatttattttatataaatatgatctaaagttacttagtagaatttaaagactttcatttaattttaataatattaagcctacttatattaatgagttgctgctagaaaaacacacaaatgaaataatttttcttctaggattccaaactgaatcagttcttcagtttctatcaaatcccaaccctcagtgcatatggctgaggtggggagaggggctgggaggggcaaggagaaatggaatgggccctgcttggcaggctgccagatgaagaaggtatctaatgcccatccccaactaacctcaggttacacagcactcagtcatcatacccatgatcatatagcaaaaaacaataaacacacaataagaaaattttggttctggccaggcacggtggctcgtggctcatggctcatgcctgtaataccagcactttgggaagccatggcagaactgctggaagccaagagttcaaaaccagcctcggcagcaaaatgagacccccatctttacaagaaaaaaaatttgttttaattagctgggtgtggtggtgtgcacctgtagtcctagctacttgggaggctgagacaggaggatcacttaagcccaggagttcaaggatgcagtgagccatgatcacaccaccgcactccagcctgggtgacagagctacactcctcaaaataaaaacggtggctcacgcctgtaatctcagcactttgggaggccaaggtgggtggatcacttgaagtcaggagttcgagaccagcctggccaacatggtgaaaccccatctctactaaaaatgcaaaatcagctgggtgtggtggcatgcacctgtaatcccagttacttgggaggctgaggcaggagaatggcttgaacttgggaggtgtaggttgcagtgagccaagatcaagtcactgcactccagcctgggtgaaagagcaagactccctctcaaaaaaaaaataaaattacaggctcatgcctgtaatcccagcactttggaaggccaaggcgggcggatcacttgaagtcaggagtttgagaccagcctggctaacatagtgaattcccgtctctactaaaaatacaaaaattagccaggcgtggtggtatgtgcctgtaatcccagctactcgggaggctgagacatgagaattgcttgaacccgggaggtggaggctgcagtgagctgagattgtgccaccacactccagcctgagagacagagtgagactctctcaaaaaaaaaaaaaagatatatatatatatgtgtgtgtgtatatatgtgtgtgtgtgtgtgtgtgtgtgtatatattcatacctgtataattttcatcaaacaatgtgtgatctagcagaaaggtcatggagttaaataggtcccagctactttctctcactctgcctgatgttaaagggtgctgtttctatgtactcatctcgataacttccctttatagagtcttctgttgcctctgtacagaggaagacttgggagcggttgtgactcctgttactaaagaggacccttgcaacaatgccatgcctgctgccagccaccagcaacagaagaggtgaggtatgaaacgtgtacttcacttctttaatagatgataaatcctgttacttcttttataattacgttcactgtgttaagggatgaaaaacaatactctagcttcctatagaaattcttggtagaccagttattcgttatcctgtacagaacatacatttcataggcataattatgttaggttcgtaaatacatttccagcatatataatttgtgttatgtgacatattccagaaccaaattcttaacacaatttgcagactgtttgtactcaactctgtgtcttttaacaatagccctgttgcagggaaggatccagtggggaaggagggtgtaaaatctatggtttaacagctattgaaaggaagccaagaaaatagctccttccacactggcttttcccagcacctttcctcccaggcagcttgtgtctattggtgtctgcatcgataaagagaaattcttatttgtacctgatgttagactcatacctcttctgcggttgaacttgaggttttgcaccctgggcatgctgggctgtttctgtggtgacggccgctgcagctgcacctgacttccacctccatggctgacagaccctccagctgctggatgccactgtgacaaaattaaagtgctcgcatgaaatctagctagaaagtaatttcttctgaagaggtcctcagagcataattcctgactttaaaatttaaagagatcccatggcagaaatgattttcctagcatttctctgcaggcaggtaaaggaacttaagccctctccaaggggatggggtggaggatcgctcccctaggatggccgatgagagcctgcagagaagcattttagaaactacacacacctcctctccccacctcggctgcagattttgatacaatccctcacaagaacccctgcacgagaccaacatgactgacagtagcgtgctgctcctgtggaaggagaaggggctgcagaaaagtgaaaagccgccgatttcgggagtggcgagtgggccagtttccaaatagctgcagttctcctttctgcctccaagccttcttcggaaagcactcgtgctgagaacccagtactgcccttgaaccttgacaaggggcctctgcttcccagggcctgttctggccctcctcccactgcaccccaccccacggggtatgcagtctctaccaccaaggagacatgccaccccaggagtccacatcccacgtgccagaccaggctcccagcgccccaggattccctgtcccccaagctccacacccactcccagggtctgtgcaggcattttttcagatccatcctcctgagggaggttgtgccatcagtggatcaagtcttgacctgaatggtggccaagggatagatagctgtttgcaggggcaagagtggaactgggcatgaagaccagagagtccatccaggctgtctgtgaggctccccacaaggccagaaagagccagcggcaagaagagaagcaggaaagcatgtcagtcagaggcaactctccaaaggcctctacacttctgcaggaactcagagagttcaagagctcatccttccaggttgtgatcaaggtctatttgtcaacataggaggacagaacatatttcccagtttgttagcttgctatatcccacataccatatatgtgccttcaagtatacccttgtcctgggccccacaggaggtggcagtgggtctgaagaacccacctgaattgaggagatcatgtgccatactcagctgtcatatgaagagtactggtccttaaacagccagtgaaatgaaactgaagccatataggaagtactgaagatggccatgtgagacggtggttactgtggtgcctggtgctatgcacatgacctcttccccattctcaaaccagccggttagaaaccagcttgcgatcagtctccttctgccctcctcctcctaagaggcaaaggtgccctgaggaggaattcaggctgtgggttaagcagctctgactctgaattcagctctgccacttactagcaatgtgacctggggccaggtcttcctgagcctgagtttccccacctgtaaaatgacaccttgctacagggattcttgaaaggagtagagcagaggagtgaagcgttctgcagtgtccaccatgtgattagtactggtgttagtttcaattgtcagtttctagaggacgggaactatacctgctctgattttatcacctagcatgtctgtaaaatataagagaattatatctccaggccattagatttccaaccacccagattgtacacattcctagcacagccaatcatgtcagcttatgctgaataatctttaccaactcaaagtggaagtgcaaagattccataaagaagttcaattccatctggtttgagttggtgttttaaaaaaaaaaaaattcaattccaaggctcaaaccaactcacatctccttttttactaagtttaattctgaacttcatcgtgggatttaaccaggttcctaatcatgctgcaatggccctaattccttatgagtgagattgtatcggattccatggggcatgagaatgaaaccttggcattccacagtttgactgctggtacaagtttagcatcccaaatgtgaaaatccaaaatccaaaatgctccaaaacctgaaactttttgagcactgacatgacactcaaagaaaatgctcattggagcattttgaattttagattttcagatttggaatgctcaatctgtaagtaagtatattccaaaacctaaaaaaaatctgtccaaaacacctctggtcccaagcattcaggataaggggtactcaacctgtaataaaatgacatttcctccttcaaacctaaaaaaaggaaggagtgccaggtgtggtggctcacacctgtaatcccagcactttgggaggcagaggtgggaggatcgcttgagcccagacatttgggggcagcctgggcaacatagcaagaccctcgtttctacacaaaatttaaggagttaaaaaaaaaagaaaggccgggcgcggtggttcatgcctgtaatcccagcactttgggaggccgaggcgggtggatcacgaggtcaggagatcaagaccatcctggctaacacggtgaaaccccatctctactaaaaatacaaaaaaaaaaaaaaaattagccaggcgtggtggcgggtgcctgtagttccaggctgagacaggagaatgacatgaacccgggaggtggagcttgcagtgagacgagatcacaccactgcactccagcctgggtgacagagtgagactccatctcaaaaaaaaaaaagaagaaggaagcggtggggagggactagattttccaactagtagatgaggatttcctaataaatttgggagctagtagcttttcaagctgcttaactattaccatgtcttacttacaaaattattttctccatggttcaccagattctcagagaggagaatgatgtcgctgccaagggaccctttccactcaggttcgttaatacactcacccttcaaggactcatccaaaacactcctctcccctaatgatctgaagattctagaaaaatgaaaagcgtctcctaccaaacaattagcattcgtccaggctaaaggagtttaaagtaaacattcaaagggccaactgagactctggaaaagactcagctcacagctgaagagaatctgatggcacgggcagcattgcgtggcgtagagagtacgtgttcggaaaccagagagatctgagcagaaatcccacacgggaccaagaggctgtatggctgggcctgggccactcactgagatgctgcgagtctcacttttctcatctgcaaaatagtgataaggctacttctgcagggctgctgtgaagataagaggggaaaaatatgtccagccccaagagcaatgccttgcacactgcatgtggctgagcaaaggggtgaagaatatccaatagtatagacttgcccatttatgaactaagaccaagtaattctgcccctcctccttacatggataactgatctacctttagaaggcctacaaacaggccgggcatgggggctcacgcctgtaattccagcactttgggaggccgaggcgggagaactgcttgggcccaggagtttgagactagcctaggccatgtggagagaccctatctctattttgtttaattaaaaagaaaaaaagaaggcctacaaacaataaaaatgatcaaaccgacagataagcagcaaaacagaagatgacataagaaaacgaaacttcaccgggcacagtggctcatgcctgtaatcctagcactttgggaggccgaggcgggcagatcacaggtcaggagatagagatcatcctggctaacacagtgaaacccatctctactaaaaacacaaaaaaattagccgggtgtggtggcacctgcctgtagtcccagctacttgggaggctgaggcaggataatcccttgaacctgggaggcggaggttgcagtgagccgagatcatgccactgcactccagcctgtcgacagagcgagactccgtctcaaaaaaaaaaaaaaaagaaaacaaaacttcataactcctgcagtggtggacacctgtagtcccaactacttggaagactgaggcaggaggctcacttgagctcaggagttcaagaccagcctaggcaacagagtgagactcggtctcaaaaaaaaaaaaaaaaaaaactctcaaaaaacaaacttcataattcctggacaaatccaataggtgatcattcagaagtatacctatgacttaagaagttcctaagttatgacttcatgttgttgcaaaaagaaataaagaaaaaggaaaaacagaaaaaaaagttcttaagtatcaactggttcttcaaaaccaaattaatattttggatccttgtgggcgaggcagaagagggtggggggcgagatacacaagtattgaaatctataatggcacttttctatcacataggagatgaggattacttcaaaagtacttataaaatatgcaccgtttttaaaattaacaaaagaaataaggttctatattataactattaataaacatagtgggtgcttcaaaatattggttagttgctgatatggagccaaaatgttctaatgtctcttatgtaaaccctacaactcttttattatcctagaattgtttttctaattacataagacaatatatgctcagtgaaaaaaaatgtttggggggccaggcacactagatcatgcctgtaatcccagctaccagggaggctgaggcgggaggatcacttgatcccaggatttcaaggctgcagtgaactatgatggcaccaccgtacaccagcctgagcgacagagcaacactccatctcttaaaaaaacaaaagaaacaaaacgtttaaagtttggaaagaaaaaggcaccaagaaaaaaaataattcatatagatagctaaacagacagataatatatggcccacccccggaagcttcttattaattctgtaatatgctaaatacataaagtataaaactttgcttttccacttttactttcagaactcattttcggaaataatcctcagtgttttctcacacagaagttgatcttttcctatcaaccaaaatgatgaagtattataactatgccttcaaatcaaagtctgtaacacaaataagactccaaatctacttctgctagcgtttctgaatctttccacttttaacctagactacaaataatttaaagtttcacatattgttccacgacctcaaatctaggacctgtcagactttatttgccacaggaaaggtcagtgaaagaaaagattagttcaatacttctttcagccccacgactggcactgtgctgcctcttcttaaaaaacaatgccctttgtcccccagcgcccttagtgagctagcctcattgtacactgggtccttagtattttcctaacaaaggcacgtctaatgagatatggaggttcagaggggattccctccactccaagtaggtgtcagactgacgaacgtcttagaaaaatatgtccggtctgtgtccagtcaccgttcggatgcattgaataagcatcttattcgtggcagccttctgcatgaatggctagacatcttgaggatgcctgtgtactactgtgtgccaggcaaggtgctcatgttcaaggcaagccttaaaaaaaaaattaggatttcaatgtacatttaccaaagctctggcgaggttaggtgccttgttcaaggtgtcacagttggaaatgctgtcccagccaggtgtgtgagatccacagtcccatcagctcatcctgtggtcacaacctattcacggtttgcatcagaaacgtgggaggctgttcctgggtcttacaagttccccagatatctctagaaaacgctagcccaggctgccccacggggggtcccgctgctaaggagaagtgggcacagagggaccaaggaccatgggctttcctcagcagggagggaactgcagggcagatgtccatggtggtgatgatgaagatgccttccttactatcctctatggcaggcccataacataccttccctcgcgtaatcttctcaacagcctggttattgcaggtgacaataaccaaggctctgggaaattccagccactgctccaagccacccagccgaccgatgggacttgaacctgcgcctcctggatccgggcgccctccccgcggcctcccgagccctgagtgctgccctcagccctcccttctccgcgacgcccctcgcccggttgctcgcagcacccccaaggccgctccccgaatcccccgggcgcgagggcccgggcgccagctgcccgctctgcccacgccttctcagggatcctggccctggcggccgccgcgacagacccacttacgcggatcgcggagcaggacgcccgcggcgcgcagggccgcagccatgtttgcgccgagtgaacgcattgcctgggcagcctcggcccgagtccgggctcctcccgcggcggcgcgcccaggtgtccgcccagcagtggccgagccgggtagcgatccccacgcgcgtccccagccccctgacctcgcgccctcccggcgcgcccgctcattcgctgccgggccggggcgggcgaggccaggcagagacacgcccctcgcggagagcccgccccagctgggcgccgctccctgcgtgaaaatgggcccgggggctgagctagaagcccgctccccaccaccatcgcaggtcactgcaaaacctgctggactcctagttgcgtgccctgtttgcatctgccaaactagcgaagtcaggatcctcagccatgactcagcaaataacttttttcgacgtttccattactattatttagatataaggatgcttttgcctcagttctccagtttgcctgcctagtcacaacacaagtgtgcagatcctgttttgttttgctttattttcagaatagaaaaagggattattcagtttctctgcaccctctctgtgtagcagaatttgacaggtgaaactcactgaagagcattaggaaaagtgaaggccagcctggcaagtgcatttcttggagggacggtatgatgaggtttgtctgtatcatatccgcgcaccttcccagtttagccgcccgtcccgcccccaaggtcgcacactgagatcactgggaggaacaggcgcccatttcattcctacacctccgtcagcccaccctgcctatatatgttcagtgcattgtggagtaggaaaccagcccttggtacagaaaggtctcaggcatcggtattcattgaacaaatattgagcacctactatgtgcactgggaaaacagtagtgaaaagagtagacgggggcttacatggggttaggggagacacagaaaataatcacaacatgtaatactttgaatgatggagcccttccacggcctcccctcttctttttccctctcaggacaaaagaagaatgaagcaaggtaaaagagatggggtagggtgggggaagggactaatgcaatttgaagcaggtgggtcagagtctcacacattcgagcaaaggccttatacacatttgagcaaagggggcaagccatatggaacattcagggaagatggagtctagattcagctgaaacccagttttctgtagcttaaatatgtgctactgatggaattagtttatttcttattaaagttggtcctcctgatggttataagcccaatgcaaaatgtcaaattaaatggatagcctttcatattacctacatgatcttcatatccaagcggatgtcctgagaaaagcacagtaaaacctgctccaggtatcaacccaccttccttatatgtgtggctattctctaccctcataaaaaaattatagtcttcttaagttgccctgtaaagaggtgatcttcatggataacatacttctctacctacagtctgaacccatttttgttgttgttgttgttatttgtttgttttgtatttccagtagatacagagttttgccatgttggccagactggtctcgaacttctgacctcaagtggtccacccacctcggcctcccaaagtgctgggattacaggcgtgagtcaccatgcgcggcctgagcccatttcttctaaagaaactaaattgaaaggctgcacacctcgcaatgctgtgctggcagacatgtagacaaggccagagaataaaatggccgggggggttagacgtctgagctatgaaggctcttcttgtcccctctgggaggccctggagaaagtcatcccctccatccagggtgctgggccctcctgctgggtagagataagggggcttctggtccctcccaggcaaacgctgatgattagtgacaaggcataaaggtgccaagtctcaccagtacaaaatcaatggctggcgtgggttaaatttctgtccagaaatgattatggaactagcaagacatactttattaaatattttaatgaatcagcatcatttcatttcttttattcgcatcttgcactttcatttttactgacttctttttttattttttattttttcattaattaattaattttttttgttttttttttttttagagggagtctcaccctgttgcccaggctggagtgcaatggcacgatctcggctcactgcaacctccgcctactgggttcaagtgattctcctgcctcagtctcccgagtagctgggattacaggtgctttactgacttttaaaaactcattcaaaattcctcatgtataaaacctcctggtgcacatattaagaactcatgggttataactgaaaacagaacttcattctttttccccaacagagagtaccataacaattgttattcctaatctatggcttatttcttacaaacattgaatataacagctttccaatgagtaaatttttatgttcttatgcagtgaaagcagataaaatgtgctttatgttggtccttttcaaaactggtagaaaacacagtccttaatccagaaattgtgaactctaaatacaggcttaccagaaaagcccttgaaaggctaaagaaatttgcggaaccatatgatatacataatatgaattttttctgacttaacatatttttaacaaaatgacacaccaattccattagcaaacagaaggctaaaaaggcacagtgtgtgggctaacggagataaggagcaccccaaccaggagggagagggtttgtctggggcctggtgagttcattagtgaataaagcactcacctgtcacagacaccactctgagtgcagcctgtgatcctaaataaaatgaatttgttggtttcagctcagtgcttcagggaaaggggtgggaaatctcttcattcattatttgccatgattggcacctctgagctacacaaactaaatttagattattcaactctgattccttaatcagaaaaataactggggaagggaggaatcaggaggcattcagggcaagagaaacagtggctgcatgtaacaaatggtaagctataatgattactcagagaaatctgatcaattgtccctagaatcattttacaacaaagaggccaccaaatccaggccaacatgccatgcgttttgacttgcccctcttcaccacgcagagccttcagcccaatggtggtgacgggtttattaatccatctgcccatatttcctgaccatctaccatgagcaaaacattaggtcatgtagaggataaaagagtgaaaaggaaaacaaacaacattctcaaacagctcattcgcttatgaaacaagcgtatgggagactccagtctatgtcaggcacatggcaggcactgggtgtgcagcaatgaaccggacagtccctaatttcacggaacgtaccttctagaaggcaaggcagacaatcgttttacaacaaagatgaaagacatacaacatattgtcaggtatggctagggaccagaagaaagctaaaggaggtggaggaagggagagaggccgcaactgcccaggtcagtagtgcagtcaggaccagcctctctgcaaaggtggcatttcagcagtgacctgaagggagtgagggcgttgtccggggaagggcttgcaagcagagaggccagcaagcgctggaacacatttgaggcttgtattcatttcctagggctgctggaacaaaataccacaaaccaggcaggcaaatgtgttgtcgtccagttttgaaggctagaaatgcaaaatcagggtgtcagcagggctgtgctccctctgaaacctgtaagggagaatccttccttgccttttttagctcatggcggtggcaacaatccttggcgttcctcagcttgtagatgcagcactccatcctctgcctccacagtcacagcctgtcttctcctcttggaaggacgccagtcattttggattaaaggcctactctaataacctcatcttaacctgactgcgtctgcaaagaccctgtttccaaataagttcatgtttacaggtacctgggggctaggatgtcaacatgtctgttgggggaacacaactcagccccataacaaggctgtcaaagaacagcagggaggccacatggcttgagtaggggggcggcgagaggtaggggaaccagggcggattgatgtagaactttgtaggtaatgaaaaactgtgtcttctgagtgacctccattcttcacttatactgcatgactaaatgtgcccattgtggctgggtgccgtggctcacgcctgtaatcccagcactttgggaggctgaggcgggcagatcacctgaggtcgggagtttgaggccagcctgagcaacacagagaaacccgtctctactaaaaatacaaaattagccgggcatggtggcacatgcctgtaaaccagctactgaggaggctgagacaggagaatcgcttgaacctgggaggcggaggttgtggtaggccaagattgcactgttgcactgcagcctgggcgacatgagcgaaactccatctaaaaaaaaaaaagtgcccattgtgattttttttttttttttttttagctcattcatactgggtgttttttccagggttctctgcttcctgggtggtggaagggtccctaagaggcctttctgatttgcttcttccaggacccaggggtcccaccagtcttagaccaagtttgtgtgaatatctcaacttggttgtcctgttccctgcagttgtataaattcacagccagggagtaggcattccccagagccctgggaagatggcaggcttccttgtgcttctctgggctagagagccaattttctggattacttttcacagaagtgccgggcctctgcggccctgcttcatggaggggtctggttctagctccaccttcctatggctgcatgggcattctaggagctgggcacatgatgtgttcactgtgaaaactcatggagttgcatgcttatgatgtatgcctttttctgtataaatgttatactttaatgaaacttttttttttaaggggccccttggtgcctttatctggctgggcactggctgggctcaattctccctggagcccccattcctaacctaacagctctgactttgagattctctctagcccctcccctccaattctgatacccagagatgttcctttctcacctaggattttgagggcaaatagatgtatctagtaaatctgtttataatgcggtaacaagaggtgagcagaagtttccctgataaaagtgagagagggtttcaggctaagaagatgaaggaatgctttccatcgaggaggtgtctgaacttacaataagaggactgagataggctgaatgtgcagagacagcaagaaggtggaagagcacatgagaaccaggagcaagaccttcacttggccatagcacagggtatggcgaggactaggagaaaaggctggggtcccagcccgaatgcactgagggcttggcccttcataggccagcagaggcatcaagagccatgacagtcagggaggtgagcagctgctgtggcagagaatactgagcaaacagggtgtgggtcataggacgtaataggggccaggcaaggagaccaagctggacagagtggccacaggtgaggattgaggtgtggagcagagtggcaatggaagtgaagatggcaggggagcaaatggtatggagaaggccaggcccagtggctcacacctgtaatcctagcactttggaggctgaggcgggaggattacttgagcccaggaatttaagaccagcttgggcaacatggcaaaaccccatctctacaaaaaatacaaagattagctgggcatggtggtgtgcacctgtagtcccagctactcaggaggctgaggcaggaggattgcttaagccagggaggccaaggctgcaatgagcagtgatcacgccacttgcactccagcctgagcagcagagtgggaccctgtttcaaaaaatatatttaaaattttttaattaaaaatttaatttttttaaaaaaagatatggagaagtcgagaggacaggcacaggttatggcatcttaaagataagaagcaggctggaatcaagtaactccaaggtttctggtcttcatgaggccgaaaaagagaagcacattagttagcagcagagctggtctgagacaaagctgggggctctttgtcattgctgttctcattgttttgtttctaaccacatatattttatgctgcaggaagtagaaaagacaaagaggtacagctaatttttttttttttttttagacagagtttcactcttgttgcccaggctggagggcaatggcaccatctcggctcactgcaacctccgcctcccaggttcaagcaattctcctacctcagcctcccgagtagctgggattacaggtgcctcccatcacacccagctaattttttgtatttttaatagagacagggtttcaccacattggtcaggctggtctcaaactcctgacctcaagtgatccacccgcctcagcctcccaaagtgctgggattacagacatgaaccacactgtgcctggccaaatttttttaaaaagttttagtggtcattgatatagcaatagtgattgaacctagccattcattcatcattttttcagagcctgctatgtgccttgcatagcccaccgctgcccacaagcagcttatacaccagcagagaagcagctatctaaacaaagagaaataaaaggtacagaggtctgttctgggttccatacagcagcgggaggcaaggggcagggctgtcaggacagcccccaggcagaggctgctggtgccccgtatcatttccaggaagacggggcggctgctgggggacaggccttgcaggtcaggagggcagcaagccctgtgacagcaagatgggttctgcagctgctggttggtcagtgagaagggacgatctgaaggatttagcgaggtgagtactgagtcctggaggtgggcaggggccggctcacagggagcctggtgagccagggtcaaggtctgggctgggtcctgtatgccacagactagagtagctgcaacaaggaaagttaagacaggcttctgggtcacactcacatttagcccgcaggaaaaggagtcacaataactgtaatggcttccatttattaagtgccagacatggaatcgctgcaactggcttataaagaggaggtaccaccctgttttacagatgaggaaaacagagtcacagaggtcccctgacttgcctgaatccagttagcaaggggcagagccagtatttggacccaggtatgtttggctcccaagccagggctggctccataccttcagggtgcatctcacaagagaaaaaggtgacagaaagcaggggtcaggccaggcatggtggctcacacctgtaatcccagcactttgagaggccgaggcacacacctgtaatcccagcctttgagaggccgaggcaggcttgaggtcaggagtccaagactagcctggccaatgtggcaaaaccccatttctactaaaaatacaaaaattagcctggtgtggtggtgtatgcctataatcccagctactagggaggctgaggcaggagaatcacttgaacccaggaggcagaggttgtagtgagccgagatcacaccactgcactccagcctgggcaacaaagcaagactctgtctcaaacaaaaaaaagaaggcaagcaggggtcagagagcgcctatggagttctcaccactcacccaggtgttcctgtcaccaatgtcacggatttgttagaggcactgaattatgaattcaaatttgtgcgtgaacctgaatgcacgaaggaaattcttttttaacagacatagccagagaataataggtatctacccattcccataacccagttaaatttcacttataacctttcagagttacatactgcttttttcccatttacagagaattcatcattctccttgctattttttccttcctaatagctaataacggatcatttcttcccttttgtttatgcccactcccttttgattggtcttcaaatacagagtaatgacctctgggtaaagatggggcttgaacactagggtatagtttcactctctcccaaaaaccacactgaaatgatggtagaggttttgttcatgacggtggtattttttgtttttaagcacaaacctaaaagaatgggaaaaaagaaaaagggaaccaccatggaatttttaaagtggcagcagatgaataaatacttaatgttttagcagacctgagaaaactgaatcctaagctggccatccgtattaaacaaaaaccatccagattacactagggggctcaggactggcagtcgcaggtaccactggaagtagggatgaaaggagatgctagaatgagatggacggaaagtctgttaaagcaggctgggcacgatggctcacgcctataatcctagcactttgggaggctgagacaggaggatcccttgagcccaggagtttgagaccagcctgggaaacacagggagaccctgtctcaaaaaataaataaataaataaaatcaataaaataaaattaaaaaaagagtctgttaaagcagcagattgcctagattcccaccctgcagtggagtgactgctccccccaaacccctaaagctaactagatgtttggttcctggagaggtaacagagggctatggactgcagatcccaagcacagctgagagcagggccaccacagaaaacagcttagtgaactgtactaactgaaggtgcagagacccagccctcttctttttccctccacaggaaacccaactagcctaagaagaaagacctaacagacaatggcatgggcctcccctgctaatccacctagggcagatagcctacagtaaggctcacatctattcacatgcttggagcatccaatggacattttaatctcctatcctgaattatctctgaattttcagcagataaccaagcagcacctgccatctcaagaaagcctgtaacaggaaagccagagaccaaacaaagcaggaaaaaaaaaaaaaaaaaaaaaaaaaaaaaagcaacccaacgtggaggaaactggaatgatacaggaagaaaactagaaaacttagataaaaaactaaagacagaactttctgaaaccggaataagaattttttaaaatatatttttactatggttaacagaaataaaatactcaaaggactggggaagagttgaggaaaacgccccaaattagcagcttaataaaaaagatggccaggcgcggtggctcatgcctgtattcccagcactttgggaggctgaggcaggtggatcacttgaggtcaggagttcaagaccagcctgacggacacggtgaaaccccatctctactaaaaaattatgaaaattagctgggcatggtgccatatgcctgtaatcccagctacttgggaggctgaggcaggagaattgcttgaacccggaggcagaggttgcagtgagctgagatcacgccattgcactgcactccagcctgggcaacaacagcaaaactctgtgtaaaaataaaataaagtaaaataaaataaaataaaaagataagggccaggtgtggtggctccactataatcccagcactttgggaggccaagctgagaggattgcttcaagcctggaattcaagacctgcctggacaacatagggagaccccatctctacagataattttaaaaattagctgagtgagctggcatgcacctatagtcccagctacccaggaggctgaggcaggatcacttgagcctgggaggtcgaggctgcagtgagctatgatcatgccactacactccagcttcagtgacagagtgataacttgtctcaaaaaaaaaaaaaaaaaaaaaaaagacaagaaaattgaaaagaggatttctagtatctaaatagcagttgtagaaagaacaaaaaaacagaggggagaccttcaatgaaacaatttaagaaattttttcacaactgaagggcatgactttctgtattgaaagggccaattagaatggatactctcaataaatatcatcatgaaatatcagacattgaactaagcttccagaatagacaggtcatatgtaaaggaccatatatcagaatgcttaggaattctcaataacaacaccagaaaaccaaacttcaaaattctgaaggaaaatgctttctttttattattatttttagagacagggtctcacactgtcacccaggctggagtgcagtgacacaatcatggctccctacagcctcaaactcctcagggcaaaagatcctcctgcctcagcctcccaagtagctaggattacaggtgtgtgcaccatcacacccaactaatattttaatttttttgtagcaactgggtctcgcaccagccttgccaacattgcaaaaccccgtctctactaaaaatacaaaaaattagccaggcgtggtggctcctggctgtagttccagctacttgggaggctgagacatgagaatcacttgaacctgggaggcacaggttgcagtgagccaagatggcgccactgcactccagcccgggtgacagagtgaaactccatctcaaaaaaaaaaaaaaaaggcggtctcaaacacctggcctcaagcaatcctcccaccttagcctcccaaagtgctgggattatgggcatgagtcatcgcacccagctggaaaatgctttctaacccacaattctttatggagagtatgtgaagatagatttaaaacatttttagacaagcaaggtctcaatgaatttaccttccatgaaccctttctcaaaaaactactggacagccaggtgcagtggctcaggcctataaccccagcactttgggaggccgaggcaggcggatcatctgaggtcaggagtttgagaccagcctgggcaacatggtgaagccccgtctccactaaaaacacaaataatctgggcgtggtggcagacgcctgtaatcccagctgcttgggagggtgaggcagaagaatcgtttgaacccagttggtggaggctgcagtgagccaaaatcatgccactgcactccagcctgggcaacagagtgaggcctcaactcaaaaaaaaaaaaaaaaaaaaaaaaaaaaactgctggaggatgtgctcaaccaaaatgaggatgtaaactgaaaaaatcaggaaacatagaaaacaggaaacaggatgtccagtacaaaaaaaaaaggtaaagggaacacacaggatggtaatgaaagatcccaagatgacaactatgttcctcgagggcaactcgttcagattaaagcaggcaaaggctccagaagatgggaagaagtaactgatagacaacccaatatatccaaacatcttttgtgattgaattattaaagaaaaaataagacaaatttagtatagggaaaataaaaagttgggcagaaagagaaaacaactattgtgaactatgcagccaaccaaaattataattgaactaagttggaaatatggcgacatggtttgaacgtttgtcccctccagatctcatgttgaaatgcaatctccagtgttggagggggtgcctggtgggaggtggtggtcatggggaggaatggcttggtgctcttcatgaagtgatacatgagttcttgcactgagttcacagcagatatggttgcttaaaggagtgtggcacctcccccatctcttgctccctctcatcatgggatatgctggcttcccctttgccttctgtcatgattggaagtttcctgaggcctcaccagaagcagatagcaacaccatgcttcctgtacagtctgcagaacggtaagccaaaataaaccacttttctttgtaaattacccagctgcaggtatttttttatagcaaccccaaaacagcttaatacacttggggagatgagaagggtgaacacgaatggtggggataggaaaaggaagaaatgaaatccttatatgccagagaagggcaataaataacgcctaaaactgaaaaatcaataaagtaatataagcatgttatttagcaatttggaggtaaatactgaaaaaaagctaaaacttttgaacaccttcatttctgtaagttggggtactaagacaagttttatccaatacaaacttgattttgactgtagaaactagtctttgtcccacaaacaaagtttatcaatatctcttcaaagatgttcttcacctgatcatcacattggttatgatccataaggcagaaggaaacttttcagcataagaaactgagtcattaaccagcaatttccaaatactagaaattgcagtatttgtatatcatgacatcccttttttcccagaagggctggatgaaatatacttattctatggcaattcaaaattcaagctttgaagtttctcagccctcagtgttcccatttcaactacagagattaatacaaaatcaatagagaacctacagcaataataagagaggcttaaggttgagtttagaagtaggaggaagccacctggcgactgtcaacctcactgtgcaacaacctcccctggggagcttttaaaaaataccctggtcccatttctgaaattcagattcaactggcctggggtaaggcccaaacaccattatttttaaggtccccaaatgatcccactgtgctgccaagattgcttttcacagagttgaactactctacgtattaaggacaacatttttaggaaccattacgaggcagcaaggtggcaggggctgaacggcaaggtgggaaactgggtcgcttgaaatggctgaaggacatttaagagggcaagttgatatttaagcaattgaattagcctcctgtttgtctccaaaactgagcaggtcacacaagtgccaaaggtggaggggtttttggtatgaaaagcagagagtttcagggaggagaaagtcacgtgatggaagtcctgagagggcaggggtgtttgtgagctagccatgggaatgcgggatggcatctgtgacacctgaattagggtagtaactacacagcgaagggagtgaagtccacacgcgtgaggtttgctgctcaccgtgctcagtctctcggcctgaggtcaccaccttaactcccttatccatatcctggctctcctttaatattttaaaactttgacctgtttacaccattaaaattaaggctaactgagcctaacctcttcactttaattctgataaaatgaattgcttagttgaagtcatctacagctcattcacactcttccaagtattttttatttaaagatgcaggctgaatagattataaatgcatcatttcttcctttgtttttttttttttttttgagacagtctcgctctatagcccaggctggagtgcaatggtgcaatcttggctcactgcaacctctgcctccggggttcaagcaattctcttgcctcagcctcctgggtagctgggattacaggcacctgccatcatgcctggctaacttttttatttttgtagagatggggttttaccatgttgctcaggctggtcttgaactcctgacttcagatgatctgcccgccttggtctcccaaagtggagggattacaggtgtgagccactgcacccagcctaaatgcctcattttgacctgtcatttcacttaattgcaaaacaggataaaatctaatgtgtccaacagtaacacaaaaaagattacaaaaaagatttaaccatgacccacatatctaacgttaaaaaatcattcgttctcattaccatataacgttagcaatatctactaaatttagtagtacttaatttcacatatatacatcataaaaaagataaaataattgcaaaagcatgaacgaatgtgacaaagagatgtttagctttaagaaaattaagccagcaaagagtttttacgggtgttcatttattgactgctgggaatacagcctattgagaatacatgacatgcatttggtggagaaatcaactaaatctgaaatgaagccattcagtaagcctgctgtgagttaataaggtagcacagattagatctaaggacatggtgggggcaactcaaacagccactcacaattgttattaagattccagctacaatttcttttggaacttatttattcttaattacttaggaattaccaggaaagagggaaaatcaatctgcctctttaccttaaattaatgctaagagggatactgtgaatcactaaaaaactctccccaaaattatgttcttacttcaaatcctttaaggcaattctatttttacaaattcttcaatttctatgcctcaggattattagcagctaagcagagttagaaaagattaataactgatacaaaaggctattcatttgattctagtgtttactgctgaattatactgtgttctaatatgagcagatttttatacgatattgccaatttcttcccccaagatttttgttttaattcattgatgcaataaaataaatcaaagaattcaaggtacacttaaaaggacagaaagataagttactggagtatcttacaccataatctaaaattgttgaattatacatacatataacttgaataaaatgaataacttggataaagtgagtaaaatgctgaaatgtatccctaactacagtttcatgccaggtattttccccgaactttgtttcccgaacttaagaaaaaaatggatattttttcttaagatgacaaccttaatatcacttgatgttcaggtgatttgagatagtttttatggtagtagaaagaaaaacagaaagagaaaccccaatgaaacaaaaaaaggaagattctggctttttgttttcttttttaaagagcctgttcctttcataatctttcctccacgcttctggagaaaatggttatggcgtgcaacgctggacaaatcgagggtataagcacacgtctcggatgtgatacctattcagaatccacgttaagaatcgttccaagcccaagccatatcctccatggggacatgtaccgtattttctctgtttaaaaaaagaaagaaagaaagaggagtaaatacttaagttaaaactttcatctaagacagttaaaattttccaccatgaaaggagttagctcactgtggttaagaattcaactatggccagattcagtggctcgtgcctgtaatcccagcacttaatctctatgccttcatgaaccatgcataaagaaataatttggtatgaaaaaatcaaccagggaataagtactaccctggaaagaagagatttttaaaaacttttaaaataagtcaatgtctatttataagaggaaaatgaagaagggtactagatactggtaggatcaattttttaaaactcagttgcaatcaacaagccggccgttaaacaggttttcaaatgaaattaacatataacttggccaaaacaaagctggcaatattcacacaccacattataacctgcaaactgaatatagctcattcaaataccaaagtactaccctgaattctccccttttaaaaatttcaatatatacagaacgattacagtggaaaaaaatgttgagtacttaaaaaattggttttacctgatccgtataccagtaatagggagtggggtcaatcccttcccttttataacctgccagtatttcttcactatcaaagatacgcattgagcctcccacaatctcaccaacattgggcatcaacacgtcgacctttaaatataagtgaaagaagatacacaattactatcaagcgatcagacacagcactgccctagagtttaaatgaaaattacaattaagctccaagggctaaaggagccactatgatcatgtaatattcaaatgtttacatttctctaatttaacaaagcatgtcaacttcaatcaggggagggtgaaaaaacccaacgtctttaaatattgttattctagatagagaatgaaatatttggcatgagctgtacctgattccagatgacagtccccacccccttaaaaagcaaaattattaatactctttgaaacagaaactgacagattcagtaagacgggaatcctcaggacatcgctgcatgtagaaggacttgatctccacaggaaatcgacacagcaagattggttcattaatggtgtctgtcatcagtctctcaggagcttctgggatatcctgaggtcaaacaagacttcattaacatttacaacttggatcgcaacaagacagaagcagctccttcaccctgtaccagtccttcctcctatcaattcaacagagtagaggatacacacctacccttaacccatacacatttgtgtaaagaataatttctttcaaaaagaaataaacatattcttaaaactcagttatttaatgaagcataaaagatctgtctccctttacagcatatctcaagcaccatgctgtttgatgaaggaaaataaaaaaaaaaacaaaaacaaaagccagccccaagctgtgactagacacagctcagtatttttctcagtggcccgttttgtctagctctgaagcaaatgaggtccacttagtcccgtaaggcatacggtaatcatgaatgctccagaacatcattgatctacacacagagtatattactaatgacacttatctttaaactctcctgttatctacccttctttcctgttgtaatcaatcagttatgccttcgatgacagacacaatcataagacaaataaccaatgtcaaactggtaagtgtaagcacacctggaatagttacccaaacaatgttagatgatgacttaagcgcatcagtttctctctcaaaacatccttctataccacacataaattaaagttaacacagaagttaaaactgacaactctcgtcccagtaaaaatggattgagagaactggagaagactcatagatttgtttaatgaagaagtgaaatggaggtagcaatcacctagcacacctgttttcaagctccaggctctggagcccttgcgtcctcggagacgccgagaggtaacaggagatgagtgggagagctctagtctctcagcttgcatctgctttacacagcggggttctgcataagatttagttaggggaaaacaggtcttatttcataccccccaaagcctgagggtcatgtatccactctagtgtcctcatgtgtgtggaacagtagcaatgtatagtaaatgctgacaggctccccctgccattgtcctgcctaggcatttagctccggtagtccccacaatcttgcaaaacagatgttacttccaaggtagagataaggaacctgagagggggtcactggtcttcagttacacagcacaaaagaaaagaggtgggagctaagcccacctggggggccttctgactccacagcttgtgttctttccactcaactacactattttactaagtattaggaacactaaaagtatgcaagttctcaatacaaaattttgtcattatacatcataaactgaattcataggctgggcacagtgtggctcatgcctataatctcaacactcgggaggccgaggtgagaggactgctcgaggccaggagtttgagaccagcccagtcaacacagcaatacctccatctctttaaaaaaaaaaaaccaaaaaaccaaactgaattcacagaaacaagagtgctttacatagacccagtatattgtttcacctattaattccttctaaaacccaaaactagttagcagcatctacacacatttcaactgtaaaacaattagatgtgcaaatattatgtaagtaatggttaaatgcacaggaaagagggcctagcatagtcttggaaacttgagccagatgcagtggctcacgcctgtaatcccaatactttggaaagctggggtgggaggactgcttgagccaaggagtttgagaccagcccgggcaacatagggagacgccatctctacaaataataaaaaattagctgggcatggtggctcacacctgtaatcccagcacttttggaggctgatgtaggaggaacacttgaactctggagttcaaggttgtagccagctatgatcgcaccaatgcattccagcctggacgacagatggagatgctgtcccaaataaagaaaatttgcaacccaagtgcatgctgggagagtggttctcaggcaaaaccgaaatgctaagtttacctggggcactaggctaccttctccaagaccttctctcttggttttgcatttttaaccaatggctatcttctttctcgccttccacattaagaagttttaaatcactgttttgggggaggggatgaacctctttttaaaagcacaagatacattctccagaaaaaaaaaaaaaatatatatatatatatatatctatataccaacattttgcatgtgatttcaaaggcttcacaaccttctaaagcactcctaccagcctagagaatgataaagagagcttataagctgtggccaaggaagaacaatgaaggaagagggaagaggcaaagcatgagacatgaaggcagcttagaaactcacacttggccagaagcggtggctcacgcctataatcccagcactttgggaggctgaggtgggcagatcacgaggtcaagagatcgagaccatcctggccaacatggtgaaaccctgtctctactaaaaataaaaaaattagctgggcatggtggtgtgcgcctgtagtcccagctactcgggaggctgaggcaggagaatcgcttgaatccaggaggcggaggttgcagtgagccgagatctgagatcatgccactgcactccgtaggcgacagagcgagactccgtctcaaaaaaaaaaaaaaaaaagaaaaaaaaagaaactcacttacgcttactgggtggtacagaacaggcactgtcctaaggctgactctgttaactcagcgaatctgcaggcaacccaagaagcaggtcctgctgttaccatttatttgaggacaggcagatgccacccatgttactagttcattaaccagaagaagagaattggagcccaatcccaccttggaaacaatgagagaaagggatacatacttctccaaattcatagaaagttccatcttctttctttacatcatgttcttttagccaaacgatagcatctgaatagttcatccgtttgaaaggccgtttggggggctgaaagttctacagaagaaaggaaaaatataatgtgtatatatacataaatataaacattaacactaaaatttccattaaaaaactattataaagtattacttcagtgaggtgtggtggctcatgcctgtaatcccagcattttgggaggctgaggtgggcagatcacttgaggtcaggagtttgggaccagcctggccaacacggtaaaaccccatctctactaaaaatacaacaattagctgggggtggtggtgggctcctgtagtcccagctactcaggaggctgaggcagaatcgcttgaagctgggaggcagaggttgcagtgagcagagatcgcgccactgtacttcagcctggcgacagagtgagactctgtctcaaaaaaaaaatatatatatatatatatatatatataacttcagactagaaaactatgtagacattcctaaaatggaaaacatgagcctgttatataactgaaaacattataaaattattgacagtgactaacatcaaattctagtcttcaaaataattagtcacttatttcagctcaccaagccatcaaatctacaaaaactgagggtgaagacttcattgtcttccaaaaaaggactgtgactttttctttccataaacactgcacctaccgggttgagctcatgcactatgctccctgcaggtgacttcaatattcgatctaccacatcacaaaccaagtcctccaaccggttcaggaggtcgtcaaaagtcaggaaaggacactcagcttccacgtgagtgtacctgaagaacgagacaatagctcagcactgcttttctcctgcactggttttttatccagcaaggcttttaacattgggaagctgtccataaaatgccaacaatgctaccaattcccaactttgcaaattagctgtggactcccctcttctccactgagtagcaatttcttgtttgctcctttatatataaaagatcaagtcaaagtgaaaaaagagaacttagctacgatctaaggtggcaaaactttgttatatgttcttccattaaccacttaatatatcagttggttttttttaaaacataaacataatttacctacactaagatttcttctctaaagatattacctagaaagaaataaaacaaaaagacaacttcatactcagccaggtgccttcgtgttctggactgctctgcccggtatgactgagcaatacaaaaaacatctcccagggctgggaggcaggtctccaagtacaactgagaggattgagtcaaaaatgcctcttccccaaaatagtcaagcttgaagagtgtggcaccaccttctacttgtgtttgcactaatgttggaggagtaacctgttcaaatgcaaagaaggaataaatcaatgctatcgtgagcaccactattcaagtttcaaaacggcaaaaaacatattctttgcaaaagctgacgaatgcatacttacttcatagtaccccctatcaaagaagtgatctctaaagcacctggtgaccatggatcgtgcttttaggattttggacatgttttctcctcggatcatcatgtgtctgttgttgagctggacatcaacgtcagactcctcattgatcaggttgtcagctcctccagcaggggccaacccaattagttcccagaagtcacaactcagctcatggccacctggagcctgcattttttaaaagtggggtccagagaaagagggaaaaggaaataaaaaattaacagtattgaggattttaatttatgtcaaagttttggtaagctgagatttttaagaacctcctaattctcagctttagtttagttttatattgatatttttaccaatgttctttctggataaatacacactcacatacacacaaatatcttttttttttttttttgagacggagtctcactctgtcgcccaggctggagtgcagtgacgcaatcttggctcacagcaacctccgcctcctgggttcaagcgattctcctacctcagcctcccgagcagctgggattacaggcgcccaccaccacgtctggctaatttttgtatatttagtagagacggggtttcaccatgttggcaaaactggtctcgatctcctgacctcgtgatccgcccgcctcggcctcccaaagtgctgggattacaggcatgagccaccatgcgcagcctgtgcgtttccatttttaaaagatatttgtgtctgggcacggtggctcactgaggcgggtggataacgaggtcaggaaatcaagaccatcctggccaacaaggtgaaaccccatctctactaaaaatacaaaatattagccaggcatggtggcgcacgcctatagtcccagctactcaggagaatcgcttgaacctgggaggcagaggttgtggtgagtggagatcgcaccactgcattccagcctgcgcaacaagagcgaaactccgtctcaaaaaaaaaaaaaaaaaaaaacaataaaaacaggctcaaattctaataagaaattctctgaacatatttaggtgggttgttaagtttttatttccatctggctgaaaagtaattcatatatctacagcacagtggctatattatagcccatgaggatgattcaggaattccgtaaggctggaaatcattgtattctttttatcacctgagttgtacaatgtacatatttcactggaaaaggcatagtgaatttgacatgtacttcacatttattgtatttatatgctgtgatggttaatattaagagtcaacctgattggaatgaaggatacaaagtattttctgggtgtatctgggtgttgccagagaagattaacatttaagtcagtggtctgggagaggcagacccaccctcaatgtgggtgggcaccacccaatcagctaccagcctggctagaaaaagcaagaggaagaaggtggaagagcagacttgctaggtcttccagccttcatcttcctccggtgctggatgcttcctgtcattgaacatcagactccaagttcctcagcttttggactcttggacttacaccagttctttgacaggggctcctgggcctttggccacagactgaaggctgccctgtcggcttccctacttttgaggcttttgaacttggactcagccactactggcttccttgctccacagcttgcagatggcctatcgtgggacttcatcttgtgatcttgtgagccaattctccttaaaaactccctttcacatatacatctatcctactagttctgtccctctgaagaaccctaatacatatgccaaatgtacaaacaaagacactggaaaacaaaccaataaataaactattcattcacccagtgcgaaactcaatccactcacctgcttgccctttggggtaagatttagcattccatacactgcaacactgctctccgtggacaagagaactccattgtagcactgacactataaaaaggtcaaagctcaaatttagttattcacattgatttaaaaattctaccatatagaaagttaaagggattgtttacaaacaagttatctgatcaaatactagtaaaataaagagtgagatggccactgattcttaatattaaaatagatatttttgtggaagacagaggtttatctatatatagacatatacatgtaaatatatacatatacatgtaaatacacattttacatacatggataaatgacactgacccacatcacttaaaaatatctggacagtttatttatttatttttaaaaatctagactattaaagtaacatacaggttaggcacagtggttcatgcctgtaatcccatgaaggaggctaagttgagaggctcactggagcccaggagttcaagaccagcctggacaacaaagggagagataaataaaataaaaattggctgggtgtggtggttcttgcctatagtcctaactactcgggaggctgaggtgggagaattgcttgggcctgggaagtcgaggctgcaatgagctatgatgatgccactgtactctttctgagaaaccctgtgtctcaaaacaacaaacaaacaaacaaaaccatacagagcccatctacactataatcacttcttactaaagtcattaggaaaaaactgatggggaactttaaaaggaagaagtcaggctgccaacacctgaacccactagtcataaaaaagacaactggccgggcacggcggctcacacctgtaatcccagcactttcggaggccgaggcgggtggatcacctgaggtcaggagttcaagaccagcctggccaacatggcaaaaacctgtctctactaaaaatacaaaagttagctgggtatggtggcatgcacctgtagtcccagctactcgggaggctgaagcaagagaatcacttgaatctgggaggcagaggttgcactaagctgagatcacgccactgcactccagcatgggtgacagagcgagactctgtctcaaataaaaaaaagaaaaagacaaccacaccttacatgcctcttgacgtgatgcaactaaaagaacacagctttgcccatgaagtagttgtgccaaaaaactgaacctaatcagacctaacctccaatttataaaaaatgcagacactagaagaacatgctaaaggacaccacaaggatgcaaacaaccaaatccataatgtgagaagttccacaggacaatccaccagggttttcccaagaaatacatagtaatgggtggggagagggggcgggttgcaaaagaagagagaatgcaaagagagcagcagagttataaagaaaatttcaaagtcatatcactaaacgcagcatgttagtcttgtcagaatcctcgttcaaatcaatcaactataaaaaggcagtacgaactgataacaagaatctggatattagatgatatttagtagttgtattaatttggtggagggtgtgataatagtaggtgactattatctttttttttttttttttttgagacaaggtttcactctgttgcccaggctggaaggtggtggcatcatcttggctcactgcaacctctgcctccctggctcaagagatcctcccacctcagcctcctgagtagctgagactacagatatgcaccaccacacctggctagtttttgtattttttgtagagataggatttcaccatgttgccaggctggtctcaaactcctgggctcaagcagtctgcccacttcagcctcccaaagtgccgagattacaggcatgagccaccatgcccagccacattatttttcttagagatgcataagcatgtgtaattaaataaaatgatatgatgtctgaggggcagtatcataccaggattagccatatataggtggttacagaagctgggtgatgggcatttgatgattttttatatggttctattttgtaatgtgctggaaattttccacaaaagttttctccctctagccttattaaggtataataaacaaataaaaattgcatgtttatggtatacaatgtgatgttttgattcattgacattcactgtcgacataataaatgttttaaataaatgtatacaaaacaataaaggaatctactgaaaacatctaattttcaggcataaataagagaaaatatttaccaactcatccgccaagacacactgaagataacctgtaccatctcgcaacaccagaaacattaaattctttcctaaaaaatgagaaataataatttaggcagactgttctcaaggcattaaattttatatatatatataattttaaagatagggtctcacttcgtcacccaggctagagtgcagtggcacaatcacagctcgctgcagcctctacctcctgggctcaagcaaacctctcaccttaccctcccagatagctgggactacaggcacatgccaccacacctggctaattattttgtagtgacaagggtctcactgagttgcccagactggtctcaagctcctgggctcaagcaatcctcctacctcagcctcccaaagcgctgatattacaggtgtgagccactgcacccagccatgacttaatcttatctaaaggaaactccaaggttaaacattcaagttcagacctcccacatggctccctgcccctgaagtacccactggtaataccactactcagtatttgtaaaatattttattttcaatgtattggactttcaaatcctacatgatccccaagatccacacaaccaggggaaagcaggacagaaggcaacatgagttaagggattatgccttatctacccttgagtcccctgcaatgcctggggtagtactgtgcactcggtgatacataaatgttcttgaacaaaatcactttttcttatttatgtcctaaaggtccaattactgaaatccgcttaaaacatttcatttgtatttttgtcccctccaccgtcgcttttttttcagatggagtttcacttttgtcgcccaggctagagtgcaatggcatgatctcggctcactgcaacctctgcctcccaggttcaagtgcttctcctgcctcagcctctagagtagctgggattacaggtgctcacaaccacacccagctaatttttgtatttttattagagaagaggtttcaccatgttggccaggctggtcttgaactcctgacctcaggcgatccacccgccttggcctcccgaagtactgggattataggcgtgagccaccgcacctggcctgtcccacttttcaatgaaagatttgctaatcccttacaataaatagtaaaagtgacatgtttatatattataaaatatataataaaaggggaaagaggaaacaaaatgtcagaaccaagggagaatgcaaatatactgtttataagagtcaaaactatggccaagtttcagactcagatgtcaacctcctatagtaacatcccttgattttcactaaataattaaaactcaacttgacaaatatttactggacgcatcttcatcactataattgctaaccattaaaagagcatttaaaaatttttatactttcaatagtcattttaaacaagaacaaatttaagatataaatcactctatcctttaaagccaggtgaggtgctatgtgcctgtaatcccagctgctcaggaggctgaggcaggaggatggctggggggagttcaagtctagccagcataccaaaaaaaaaaagagggccgggcgcagcggctcatacctgtaatcccagcactttgggaggccaagacagtggatcacctgaggccaggagttccagagcagacgggccaacatggtgaaacaccgtctctactaaaattacaaaaatcagccaggtgtggtggcaggtacctgtgataacagctactcaggaggctgaggcaggagaattgcttgaacctgagaggcggaggttgcagtgagccgagatagcaccactgcactccagcctgggcaacaaagtgagactgtgtctaagaaaaaaagggggagagaaaaaaacccctgcaaatctttgtatgtttttcttcatctaagagcagggatatttaaacattaaaaagaaggaaaagctttgccatttaccttgcctgcgcagcctgtggacccagccaaacacctttactctttggcctctatatccttctaacgcaccaatcttcacctgtcaaattgaaataaacaacatttgttcaataatgtcatttatacacaccaactttttcactaatattaggcagacggtagtaagtgttaaaaatcacaaatggtgcaaaactggagacagcccctctactgcagctcagaaccaaacgcatttcactgtattggcatggtttaaaacaaaacaaaaaaaaatccaagtcttctttcttaatgtaaaactgataatgagaaacacccagaagaatttcagatattgctagataaaattaattaataaatgaattcctttgtcataagtggagcacttgcttcccacaacagcaacaatcccagtccacatgaagccttttccatgaccccacagttcttcaataccttccagaacatggtacttaaaaggctagcttttgtttgggggatgaaggagagaggagatgagtagaggaaggggctgttgcatgtggccaaaaaaccccagctccatcactaaggaaataatacaaaaattcatcagcaataagaactactggaaatctggctgggcgtggtggctcaagcctgtaatcccagcactttgggaggctaaggagggcagatcacctgaggtcaggagtttgagactagtctggccaacacggtgaaaccccatctctactaaaaatacaaaaattagccaggcgtggtggcaggcacctgtaatcccagctacttgggagtctgaggcaggaggatcacttgaacccgggaggcggaggttgcaatgagctgagatctccccactgcactccagcctgggtgacaagagtgaaactctgtctcataaataaataaataataaaataaaataagaactactggaaatcaaaccattttcattcatagtccagcaatctatttgggttccagaaagaacagaagaagagtgaatctaatttcacaattcacaaacttttactctatttaaataaaacatgaaaatcatagatttcaacctcttcattttataagcaaactgacactagagagggttaaatcacttgaccaacatcatgaagcgtagccaggcctgggtcccccatctgctggcattcagttgggacagaattcattcaacatgcatttacttaactgtgtaataaaatgaacccctaaagaactagcctcataactctaaaacattatttctctatgtcccttctgaaaggaaagtaggccaggcatggtggctcacgcctgtattcccagcactttgggaggctgaggtgggaggatcccttgagcccaggagtttgaaaccagcccgggcaatatgggagactgtttctacaaaaattaaaaataaataaaagttagccaggtgtggtggtgcatgcctgtggtcccccctacttgggaggatcgttagagcccaggaggcagaggttgcagtgagcagaaactgcaccactgcactccagcctgagcaacagagcaagaccctgtctcaaaataaataaattaaaatttaaaattaagaaataaaaaataaaaggaaagtaggccgggcgcagtggctcacgcctgtaatcccagcactttgggaggtcgaggtgggcagatcacgagatcgggagatcaagaccatcctggctaacacggtgaaaccccgtctctaccaaaaatacaaaacattagccgggcgtggtggcgggcgcctgtagtcccagctactcgggaggctgaggcaggagaatggcgtgaacccgggaggcggagcttgcagtgagctgagattgaaccactgcactccagcctgggcgacagagcaagactccgtctcaaaaataaataaataaataaataaatggaaagtaaaaacaaaatgtaaaggaacaaaccatgtgacatgcccctcatacacagaaataatgatctgatgtagccaagtccacggtatttgaaaagataaacaaacttacacattttggctctgggagacttggatcatttttaatggtaatcttctttgcttcttccaggttcttttctcttcgtaaactatcttctgcctaattttaatgatgaagcagtttgttaacatggttgccagagttctaactttaacaacgttcacgatggcaaggtcaggactcacctctttcttttcccgggattcactcttcatttgttccctatgccacatctttttaatgttcttcaactgtgatttagaaataacattccacctctcattttctttttgtgaatctacgtaaatggtaggaaatggttctttccctactgtcatcaaagccttgggtagggaggagagaaaagacagttcttgaacattgtacaatacttaaaatcaaaataacatctcaagtataaggcaactggaacaatctaagcataaagaccccaacagccaaaagctgatattggcacagtgactggttgaacatttaagaagcacactggttggctgggcgcggtggctcacgcctgtaatcccagcactttggaaggccgaggtgggtgaggtcaggagatcgagaccatcctggctaacatggtgaaaccccgtctctactaaaaatacaaaaaaattagccaggtgtggtggcaggcacctgtagtcccagctactcgggaggctgaggcaggagaatggcgtgaacctgggaggcggagcttgcagtgagccaagatcgtgccactgcactccagcctgggcaacagagcgagactctgtctcaagagaaaaaaaaaaaaaaaaagaagcacactggttaaagctgaagctctgaggtcctctcacaaacaattacagcaagttcgggtatacacgatacagttccccaggaaaagcagactataagcaacagatcttaagtggctgtagcaaccagcacaggtacaaggacaacagaagagacacctgacagcaaaactcaactgcaagtgacatctaaaaggttagttctctgtgagaaatcagagaagtgtcagacatttttgaaactttcaacaaaacaatggttaagaacacaaaaagcggccgggtgcagtggctcaggcctgtaatcccagcattctggggggccgaggagggaggatcaccaggtcaggagatcgagaccatcctggctaacacagtgaaaccctgtctctactaaaaatacaaaaaattagccgggtgtggtggcgggcgcctgtagagcttgcagtgagctgagatggcaccactgcactccagcctgggcgacagagagagactctgtctcaaaaaaaaaaaaaaaaaaaaaaaaaaaagagcacaaaaagctaaactcatttaatctgaaaaactcccccatgtagaatacctcttttccccaatgggacatatcaagcattgctgtgttatatatcatttgataaaatgtattgtttgtagtttttaaaaaatagttcaaagtacataaaagatgaatattttaaagcctcaaataatctttcaaaatctcttccaagttattgaatcaaacaagaaatgcagtgaattattctctgttgcaagatctgcagcctgcaaaaacggactttttctcagttctacgactgctgcagagaaggagggaatctgaggccgggcatggtggctcacacctgtaatcccagcactttgtgaggccgaggtgggcggatcacgaggtcaggagatcgagaccatcctggctaacatggtgaaaccccgtctccgctaaaaatacaaaaaattagccgggtgtggtggcgggcacctgtagtcccagctactcaggaggctgaggcaggagaatggcgtgaacctgggaggcggagcttgcagtgagccgagatcgcaccactgcactccagcctgggtgacaagagcaagactccgtctcaaaaaaaaaaaaaaaaaaaaaatagagaaggaaggaatctggatcttttgaaaacattcaagggctgggcgtggtggctcacgcctataatcctagcactttgggaggccgaggtgggcggatcatgaggtcaggagttcgagaccagcctggccaatatgatgaaaccctgtctctactaaaaatacaaaaattggccaggtgtggtggcacacgcctgtggtcccagctactcgggaggctgaggcagaagaatctcttgaatccgggaggcagaggttgcagtgagctgagattgcaccactgcactccagcctgggtgacagtgtgagactccttttcaaaaaaaaaaaaaagaaaaaaaagaaaacattcaatagttcatccttttaacaactagacattgtaagaatacatgtaggggccaggcgcagtggcacacgcctgtaatcccagcactttaggaggccgaggtgagtggatcacctgagctcaagagttcgagaccagcctggccaacacggtgaaacaccatctctactagaaataaaaaaaaaaaaaagaaattagccaggcatggtggcgagtgcctataatcccagctactcaggacgctgaggcagggagaattgcttgaacccagaaggcagaggttgcagtgagccgagatcatgccactgcactccagcctgggcaacaagaacaaaactctgtctcaaaaaaaaaaaaaaaaagatagccattgatgaaaatgcaaaaccaagagagaaggtcccatgaatacatgtaggtcgttcggaattcacttattacccgacaatctgtactgatccctccttttgtatcattgaaattgaaagagccaaactatcagttcccaaatcagaatgctacacttttgttaacagtgacattctgttgttaacagtgacattctgcaaacgttcatctaaacggtgttgtcagttttcaggagctgcaaaacgaggcacccgataatccagaaatgaaagatttccccttaagagtggttaaaaagtaaaacccagccaggagtggcggctcacacctgtagccccagcactttgggaggccaaggcagcaggattgcttaagcccaggagtttaagaccagcctgggaaacataatgagatctcgtatctacaaataagaaacaaattaaccgcgtgtggtgacatgcccctgtggtccgagctacttggaaggctgaggtgggaggatcccttaagcccaggaggttgaagctgcagtgagccatgaatgcgctactgcactccagcctgggcaacaaattaagatcctgtctcagaaaaataaataaataagttaaattaaaaacaagtacccatgtatgacacaccaaagtttataaccatatggtatgacctaaaagagaggagaatgctcccagattaggacttgatagtaactataaatgttgtaacacagttaacaaaaaaaggggatgcacagaaaaaggagtgtcaaggcactgcttttcctaatacagttcaaagaaggaacttttttgttgttgtcgtccaggctgcagagcagtgatgcaatcacggctcactgcagcctcaacctcctgggctcaagtaatccccctatctcagtctcccgagtagctggggccacaggtgcataccataccaccatgcctggctaatttttttttttttttttttttggtagttggctgagtgtgatggctcactcctataaacccagcactttgggagggttaatatcctgtctctatttattttttaaattaaatttattaaaaaatttttaagaagttaaattttttgtagagatgagggtcttatcatgttgcccaggctgttctcaaactcctgggctcaagcagtcctccagcctcagcctcccaaagtgctgggattacaaacgtgaggcaccaaagcccagacccaaggaaggaacttttaaccatcttccttatgtggcagttatagccaatggattctagcatatgagttcaacagctaagtccatggtctattttaagaaggttgtcttaggccacactttactctgatataatcaactacctaacacccatgttgtgagtccaagccctttttttgttttttcttctgagacagggtctcaggctagagtgcagtggcgcaatggtggctcactgcaacctccaccttccaggctaaagaaatcctcacctcagtctccggagtagctgggaccacaggcacgcaccaccatgctgggctaatttttatgttttttgtagagccaggatttcaccaagttgcccaagctggtctcaaactcctgcgctgaagcaatccacctgccccggcctcccaaagtgttgagattataggcgtgagccaccacaccaggcctgagtccaagctcttgacaaacccctttgagaatgagctaaactcattcaaggattctagatcctgagaaataacagcactgttaattcattaacagaatgttaataaattggcattctagcttgaagctccagactcatgagtcagctctgacaaatgaatccattcttggtggtcttggagtcaaatctcaggatcacactctggattgtggtaaattcaccaaaagccctctcaggagccccctggtcatgagctcactgtaactgaggaaaggtaacttttatctttacaagaattgaaaacccagcaatctgactcaatggagagaaaaattccaagaagcaatgccatgtggtaagaaagaagagaccttttttcaaaatgttaaaaagtaagtttagactttgatcatctaacaatcttaaagtcacatatctgtatgcattccttactttcccttttctgaaaattctctttggaacctagtgtttgaaattaagttcttggcaagtcacaagaaaattgacataactcattaataaatgcagtctcattttcctaatgagaagagactctacctttagacctgttttaaatggtttctccttggttccatctcccgtggcatcgcttccctctcggtcagagacgtacagctctgctgtttgacaaaatgagggtaagttatggtctggccattaactattagtcaccttactactttattcattccttatctttgtaaacagaacaagcatcgattaataaaaattgaggtccataagtaattaatatcctagttatttccccactccatttcaataacatccatctcataaaaacattagttaataatccaggttttcaaaatgaactctgatcattttaatttgtgatatttattctatctaattgggcacccaaaaataaaatatgggctttgaagttgatcagacatacgctggaatgttggattttgtaccttaaaaggcagggtgactctggagaatttacttaacctttctgagcttatttctttacctataaaataggaaaaacaatccccatcttgaaaggctgtgctgaggatgaaataaaataacacatacaaatcagatatcccagtgccagtttttgtagagatggcaaataaacaccagctccctctggactttaaaggaaacagaagctctgaggttagaaaatttcagaaggcctcacaactagtaggtctgaacagttaacatccatccaggtctctctctttttttttttttttttcctactgcacagtatggtctccccggaaacctcaataaaaaaatgagggtgggagaaaaacaactagaatcctaaagccccttcctgacgatcactttgaagaactgcaggagtaggggctaccctgtgtctgaacccgtcccagcgcctgagtctcagcgcaatcgggaggtttcgcagcggggcaggggaagggcccggagccaccgccatcgcagcccgggggaacgacggactcggggaagcccggcctggcccttcaagtcccgggcccagcaaaggccagcaccctccctccctccctccctgcaatcggtccccaaacattcgcggggcgcccactctggtaggcactaaggaaagcgccgaaacccgactggagcagagttcctgccccaggcagggaacaccgcgccatacactgagtctcacccacctagcaccatgcctgcagtggccctggtcacctccaaggacacagactgcaacaccgacgccgtcttatgactccaacgtgcaccggcggtttccgcgattccggcgttgcatcagagagcgtagatctgagggcgcctgcgagaatcggccgagcgccgcggttccattggttacgagaggtgggcgagcggcgccggggccgccatctttggtgagggcagaggcaacttccggatccagagacgccccgccccacgcgtttgtgcagctcggaaggcgctgcctgtcccggagctccgcggccctggagaccctggcacagtgtcacttttgcacccttccttccccgcctccccaactttcctttctgaatcttccaattccgccccagctggaggcgtgcgggtcctcttgcaaaccagaccaaggatgtcgccccgatccccagatggtggaggctggttgagttcatgtcaccagcaaacaccgcgccagctgcgagacggggtgcgcggcggtggaggggacgcagcgggttgcgtaaacttccttttttttttttttttttttgagacggagtctcgctctgtcacccaggctggagtgcagtggcgcgatctcggctcaccgcaccctccacctcccgggttcaagcgattcttctgcctcagcctcccgagtagctgggattacaggcctgtgccaccatgcccagctaatttttgtatttttagtaaagacggggtttcaccatcttagtcaagctggtctcgaactcctgaccttgtgatccgcccacctcggcctcccaaagtgctgggattacaggcgtgagccatcgcgcccggccagatgcgttaactttctaaactccgtgagccagcgtccctcggtgttcaggagaggagctatggtatatgttcatttaaaattgtaaggattaccgttaggaaggccataataatgtggtggaaagaacgagggcttcggaatacaaacctgggttctgccttttactaaccgtgtgtcttcagataaattacctaaactgaatgagcttcattcagcgagttgggaccgattgcagggagggagggagggtcctggcccttgctgggcccgggacttgaagggccaggccgggcttccccgagtccgttgttccccgggctgcgatggcggtggctccggcccctgcccctgccccgctgcgaaacatcccgattgcgccgagagtcaggcgctgagaggggtttatctgtgtcttcagataaattacctaatctgaatgagcttcagtttttctatttgtgaaagatgatataaattcactgcccgggcatgtaagaggtgctaataaagggtctgtcatcattttcaacttttttttacttttttggtgggctttttttttttttggagactgggtcttctctgttgctcaggctggagtgcagtggtgctatcatagctcacggcagcctcgaactcctgggctcaagtgagcctcccacttaagcctcccaagtagctgggactataggtgcacgccaccacgcctggcttattttatttttatttttgtggagatgggggaggggtctccctgtgtcgcccaggctggtctccaacttctgggatcaagtgatcctcctgcctcagcctcccaaagtgctggtcttacaggcgtgagctaccacgcccagcccattctcaatttagtggaataccagagtttgtccctgaagcaaaagaaaaccttttttttatgagaggtcctcaaaaaaataactctatatataggttcagggcccatcaagaatatgaaccaagtccgggcacagtggctcatgattgttatcaatcccagcaccttgggaggttgaggcgggtggatcacttgaggtcaggagttggagaccagtctggccaacatggtgaaaccccgtgtctactcaaaatacaaaaattagccgggcgtggtggcacgcgccagtaatcccggttactcaggaggctgaggcaagaaaatcacttgaacccaggaggcggaggttgcagtgagctgagatcgtgccactgcactccagtctgggtaacagagtgagactccatctcaaaaaaaaaaaaaaaaaaaagtaccaaatactattcctaaggaatatttcacccaattttatgaactttcccttttcctcttggctgaatgttttctgttggctcatggattagtatcaattgctacaaagcaaattttcccaaaccttagcagcttaaaaccccgaacatttattaccttagcagtttcttttgagacagtctcagttctgtcgcccaggctggagtgcagtggcgcgatctcagctcactgcaacctccgcctaccagattcaagagattctcctgcctcagcctcccgaggagctgggattacagacgtgtgccactacgcccagctaatttttgtattttgagtagacatgaggtttcaccatgttgtccaggctggtcttgaactcctgacctcaagtgatctgcttgcctcggcctcccaaaatgctgggattacaggcctgagccaccatgccaggccctaccttgcacagtttctgatggtcaggaataaggtagtgggttagctggaggttctggctcaggtctctcatgaatcatgctgagggcagggtctgtagtcatccgaaggcttgggtgggtggggatctgcctccaggctcactcacaagctgtggtcagaaaacctttccttgccaggtgggctcccgatagagctgctaatgacagccgctgacttcacctaaagcaagtgatcagagagagagaatattagttaccttttattttataataaattaccccaaaacatcaaatggcatttgttatctcacatttctgtggaataggtatctgggcacggtttagctgaggactcagagctgagtccttccagaggctgcagtcagcttaagttgagattcttaagtctcacctggagtggatccccttccacacacactcaggtgggtgttggccagaggtctccctcaattctttccacacgggcctcttgcttggctaaagccagcaaccaagatggaagttagaacctttagttgcctaatctcacaagggatatatcccaatacttttgccatattcgattaattaggatcaagtcacttggtccagcatacactcaaaggaagggtattacacactggcatggatgccagcagctgggaatcatgggccatcttagaaagctccccactgcagtgaccaaaactgaggctgcagtgccttttctaacctgacttgttaggtgaaatgtcattgtctctgccatattctactggtcacacagaccagccctggaggtgaatgccaggaggtgttgctcactgggtaccatcttagaggctgcccaccatagcctgtccagatgaatttctccacttcatcctgctccgccccagaggctgactcatgtgaaccacatcaatgggctccctcgttctctgactcctggtcagctgcagccaatggggaacacttgtggaagaacagaggtgggatgtgaggttggggtccttattcccgtagctcctcattgtaggctggctgcatcctcacttgagggccaccgctcctgccaggtggcactgagagattcatctgaactgcccttggtgaatttagtttcatctgatcgttaaaactgaatttactggccaggcacggtggctcacctttgtaatcccagcactttgggaggctgaggcgggcagatcacttgaggccaggagttcgagaccagcctaggcaacatggcaaaaccccgtctctattaaaaatacaaaaattatctgggtgtggtggcatgctcctgtaatctagctactcaggaagctgaggcaggagagttgcttgaacctgggaggtggaagttccagtgagccaagatcaggccactgcattccagccttggtgacagagtgagattctgtctcaaagaaaaaaaaaaaaaaagtgaatttacaaagcaacattctgttgtgaaataaaaagtgtacataggactgtgcaagcaggttgtacaagagggtcatttaaattcctacccccgcctcagtctacacctatagactcataggatttctctatgtcaagttagtgcaggatggaaaaaatgggcctagtgttgacatctgcataatatgctggcacatgccagatatgaacagccattctactctagccttacttaggagaaaccctaaaaagacagtggggagggtgggcaaggtggctcacacctgtgatcccagcactttgggaggccgaggcgggctgatcacctgaggtcaggagtttgagaccagcctggccaacatggcgaaaccccatctttactaaaagtacaaaaattagctgggcatggtggcaggcgcctgtaatcccagctactcagggggctgaagcaggagaatcgcttgaacccgggaggcggaggttgtagtgagcctagatcacgccagtgcattccagcctgggcgacaagaaggagactccgtcacaaaaaaaaaaaaagaaagaaagaaaagaaaaagaaaaaaagaaaaaaaagaaaaaaaaagaagtggtgaagggaagtcatctcagatggtggaactctgagcactgtgcctggttttccacttctcagctaagtagggatggcctgaaggaccaggctggcaatagtggctcacgcctgtaatcccagcactttgggaggcctaggcaagtggatcacctgaggttggaagttcaagaccagcctgaccaacgaggagaaactccgtctctactaataatacaaaaattagctgggtgtggtggggcatacctgtaatcccagctactcaggaggctgaggcacaagaatcgcttgaacctgggaggcagaggttgcagtgagccaagattgcaccattgcactccggcctacacaacaagagcaaaactccatctcaaaaaaaaaaacaaaaaacaaacaaaaaaaggactgatggacactggctcacgggttggccagttgatcagggactaagaaagaacaagattaaagattaggtacaggaggtctgctggggatgtggatggacctttttgaatgggcactgaatgtgaagacttcttgtcctctgcaaacatctatcagaaggcatttggtatggaggaggtctctgtcatctctggatgttggacttttcctcccaaaacatctcagttcttgctcaaagagcccatatgtgaagtggctatagtaacaggatagaggctatgcatgtgttcaacctcataaactgcccttcatcctggctgatcttgctggccactgtcactgttaagtacccaacctgccaacagcagaagccaactttgagaaactgacaggacacgattcttttttttccttttttctctattcttctcttttttttttttttttttttttgagacggagtcttgctctgttgcccagggtggagtgcagtggcgtgatcttggctcactgcaacctctgcctcctgtgttcaagcaattctcctgcctcagcctcctgagtagctgggactataggcgcccaccaccacacccagctaatatttgtacttttagtagagacaggatttcaccatattggccaggctggtctctaattcctgaccttgtgatccccccacctcggcctcccaaagtgctgggattatagacgtgagccaccgcacctggccaggacacgattctttagggagaccagctggccacttgacggcaagtaaattagatcagactcctggaggaggcagtaatatgcctcccaggtatagactcagtccacacagggatgcgccttctctgcctgcagcacccacatctatggacttacagaacgctgcatgtgtctttatggtattcagcatctctcaccccaggacacattttcagtaaaggaagtgtgacagtgagctcatacctatggaattcagtggtctaaccatgttctttgtgttagattattatttaaaataatcagacatgcttctgtgaacccagaaaatcagagacaggtctcagttaatttagaaagtttattttgccaagattgaggatgcatccatgacaccgcctcaggaagtcctgacgacatgtgcccaaggtagtcgggcacagcttgcttgtatacattttagggagacacgagacatcaatcagtagaagaattacattggttaggtctgggaaggcaggacaatttgaagcaaaggcaggaagacttgaagcagggagggggtttccaggtcacagataagtgagacacaaatggttgcattcttttgagtttctgattaggctttccaaaggaggcaaataagatgtgcatctctctcagtgagcagagggataactttgaatagaatgagaggcaggtttgtcttaagcagtttccagcttgagttttccttcgtaaaaaggaaaatattttgggggtccaagatattttcctttcacactcccttctcccatacagaaggaatatacttccctgcttcatttctgctgggcttagccatgtgcatttactttggccataggatattggcaggtgtgatgcaagcaaaggtttacaatgtgtttgtgcagttggacttgtgttcttgcttctgccattgttagagaagccgaggcctaggagggccagagtgacaccattttaagttgagctccatcttgagactccttgccagtcacaacccatggtcataagatgtttacagttgagaaaacagcctaaagatacctgcaaggacacaatcctgtaacaacagaaagaccagatgtcccaatacccgtaatatatgctttcaagataattatagttatgctttaatgtacttatacactaaaatgtcaaggagagttttctttaaatcaataaaataataaattttgtcatgctgtcagaccacatgcacaaagacacagcttagtttagcctttacatagacaaaacccctatatatcaaatttttttttttttcagacagagtctcgctctgtctcccaggctggagtgcagtggcgcaatctcggctcactgcaagctccacctcccgggttcacccattctcctgcctcagcctcccaagtagctgggactacaggcgcccaccaccacagccggctaattttttgtatttttagtaaagatgggggtttcaccgtgttagctaggatggtctcgatctcctgaccttgtgatctgcccacctcggcttcccaaagtgctgggattaggcgtgagccaccgcgcccggcctatatatgaaaaatttaaaatggccaggcgcagtggcccagcactttgggaggcgaggcgggtggatcatcctgaggtcaggagtttgagaccagcctggccaacatgcgaagccctgtctctactaaaactacaaaaattcaccaggcgtggtggcgggcgcctgtaatcccagctactcaggaggctgaggcaggagaattgcttgaacccaggaggcagaggttgcagtgaaccgagattgtgccattgcactccagcctgggcaatagagcaagagtccatctcaaaaaaaaaaaaaaaagaaaaagctaaaacaaagacggggcattcctttgcttgcttcctaaggacgccctactctgtaatggaggcgctttcaataaactctcaccgtaccctgcaacttgtcttgaattctccttcctgcgtgtaattcaggaggcctctcttggggtctggatcaagaccgctttttctgtgaacaaccaccatgagaagaacacgccctgactgacccactggtccagggaagctgagacatggagaagacagggacccaatcttcagcttggagacacgtccagctgaactcagcccacatcagtgacctgcagatgcataagtgagaataaacgattgttgggttacgcctctgagtttgggaggcattttgttacacctctttagtgtggcaatagtagactaataatacatgctctattatgcagaagtgtgtggcttaaaataatagttgaatgaccaggtgcggtggctcaggcctgtaatctcaacattttgggaggccatggtgggaggatcacatgaggccaggagttcaagaccagcccgggcaacatagtgggacccccgtctccataaaatttttaaaaaattagcctggcgtggtgggcgcacgcctgtagtcccagctactcgggacggccagaatgaacggcattatcgtctgtctcttcattctgattctggccagcaaggggtggcctccccctgcggtccttgctgttaggtccctgcgccccctcagctttgcgctgaaggtcgctttaccggaccccacttcgccctaccaggcgcaggatgagcgtctctgttcttttaatgtggcgtcccccacaggccaccgtaccaggccgccggtccggggttagggcacttgacgccggcgccgccatgttgtctccgggccacttccgcgtttctggcgcgtggtcttgcatttcctacttggtcctgttcgtggcgccgcgcctccgggtgttggggagtccgggatgatggggaatccggggctcgccctagtcgcggggacaccgccttccaggagctgtccccaggcaaactcacagacatcttcaaagagccttcttggacattctgctttttgctcctcataacaggcttcggtaagagaacaggcaaacatcactgcgggcgcctctagggctcgtttccctgtcccagtaccgggaatcggggaggggtccaagcagagttcacttagttaacaaatcagtgaagcagttggaaaatctcagttatattttaaatgagatcgagggcggtgactcacgcctgtaatctcagcactttgggaggccgaagcggaggtggagggtcgcttgaggccaggagttcgagaccagcctgggcaacgtggtgagccacccccgcccccgcccctctataaaaaatacaagaattagccgggcttattggcatgggattgtggtcccagctacttaggaggctgaggtgggaggtcgcttgagccatggaggtcgaggctgcactgagctgtgatcacgccactgcactccagcctgaggctacggagagagaccctgtctctaattaataaataaattatagatagatgatagatagatgcaataaaaaataaaattggcttgtaaacggcaaactaaaagtggaaattatcattacaatgaaaatattaatttgaggaaccgaaaacttaactttccttttcctgtagttaagtttaagcacttagatttgcttcagtgattcccaggcttcatgattgcaagctgcttgcttgtaagcaccttgtctctcactaaaaaaaattacagttattttaaagtcccgctggatgctcattctttaaggagggtgaacaatggtaactcctgtaccgttagagctctgaatgaagccagatacgttccatagatcacagaactcattttctggcttggtgagcctggtcaagtttcttaacctttctgagccacagatgtttcaattataaagtgataataacccttcactgggaaggttattgtgaggataatatgagatcagctataccaaaatatgcctaacatgtacttgacatccagtaagctttctgaattaggatataaatggcattaatggttaatcattgttattcttttgttccatgatatgcatgaataacaacttgaagccttcaaactgctgagagctgcttggtggacctcgtctctcaatttgcccttcccactaaacctgtcttcccccaacagtgggctttctggtcagcatttcagaatgtctcaaaccgtaggtccttcccacagccccaaatctcagcaaatgaccagtctcttgcttcaagctattaaatggatgctgtctgacagccctcccttgaaacctgcaaactctcgtgctttggcatccatcctttccctctagtgcaatgcaagtcacatcctccctctggctaacctctccacccatcttctggattccccacacctctccaatctaatcttcacactccagccagggcgaacacttacaaatataaacacagtcatttcattctctatctagcaactttccatggacttccttttgctctcagggttcacctcaacatccttacaggctttccaggctgtgtatgctctggcttaccactgcttcttatttttttttttattatttatttatttatttatttattgattgatcattcttgggtgtttctcgcagagggggatttggcagggtcacaggacaatagtggagggaaggtcagcagataaacaagtgaacaaaggtctctggttttcctaggcagaggaccctgcggccttccgcagtgtttgtgtccctgggtacttgagattagggagtggtgatgactcttaacgagcatgctgccttcaagcgtctgtttaacaaagcacatcttgcaccgcccttaatccatttaaccctgagtggacacagcacatgtttcaggagagcacagggttgggggtaaggtcacagatcaacaggatcccaaggcagaagaatttttcttagtacagaacaaaatgaaaagtctcccatgtctacctctttctacacagacacggcaaccatccgatttctcaatcttttccccacctttcccccctttctattccacaaaaccgccattgtcatcatggcccgttctcaatgagctgttgggtacacctcccagacggggtggtggccgggcagaggggctcctcacttcccataggggcggccgggcagaggcgcccctcacctcccagacagggcggctggccgggcggagggctgacccccccacctccctcccggacggggcggctggccgggcagaggggctcctcacttcccagtaggggcggctgggcagaggcgcccctcacctcccggacggggtggctggccgggcagggggctgacccccccacctctctcccggacggggcggctggccgggcggggggctgacccccccacctccctcccggacggggcggctggccgggcagaggagctcctcactttccagtaggggcggccgggcagaggcgcccctcacctcccggatggggtggctggccgggcagggggctgacccccccacctccctcctggacggggtggctgccgggcggagacgctcctcacttcccagacggggtggctgccgggcggaggggctcctcacttcccagacggggtggctgcccggcggaggggctcctcacttctcagacggggcagctgctgggcagaggggctcctcacttctcagacagggcggttgccaggcagagggtctcctcacttctcagacggggcggccgggcagagatgctcctcacatcccggacggggcgacagggcagaggcgctccccacatctcagacgatgggcggccgggcagagacgctcctcacttcctagatgggatggcagccgggcagagacgctcctcactttccagactgggcagccaggcagaggggctcctcacatcccagacgatgggcggccaggcagagacgctcctcgcttcccagacggggtggcggccgggcagaggctgcaatctcggcactttgggaggccaaggcaggctgctgggaggtggaggttgtagcgagccgagatcacgccactgcactccagcctgggcaccattgagcactgagtgaaggagactccgtctgcaatcccggcacctcgggaggccgaggctggcggatcactcgcggtcaggagctggagaccagcccggccaacacagcgaaaccccgtctccacccaaaaaatacgaaaaccagtcaggcgtggcggcgcgcgcctgcaattgcaggcactcggcaggctgaggcaggagaatcaggcagggaggttgcagtgagccgagatagcagcagtacagtccagcttcggctcggcatcagagggagaccgtggaaagaggggagagggagagagagggagagggagagggagagctgcttcttatttttatttattttatttatttattattattatttttttgagacggagttttgctcttgttgcccaggctggagtgcaatggagcgatctcagctcaccgcaacctccgcctcctagcttcaagtgattctcctgcctcagtctcccaagtagctgggactacaggcatgcgccaccgtgcccagcttattttgtatttttagtagagacggggcttctccatgttggtcaggctggtcttgaactctcgacctcaggtgatctgcctgcctcggcttcccaaagtgctgggattacaggcgtgaaccaccacgcccgactattttttatttgttcttttgagacaggggtgatcctcccacctcagcctcaaaagtagctgggacttcaggcacacaccatcacacctggctaatttttttttttttttttttttgtagagacggggtttgggggttttgccttgttgcccaggttggtctcgaactcctgggctcaagggatatgcccaccttaacctctcaaagtgttaggattacaggtgtgagccactgcgcccagccctattgctttttaaaggtacaattaactttagcccaggctagctttttcactgaattgatctgggtacgatgtggggtttgggatagctgttcagaaaggtgaagacagagtcaaagagagaaaaacattttctctatagaggtggggaaactttcagagagaattaattgtgtcctctaaaagcaatgaagtccgcttggttagtttgaagaacgatcatgtatcagtttataggaattgagacttttttttttttttttgagatgaagtctttctctgtcccccaggctggggtgcaatggcatgatctcagctcactgcaccctccacctcccaggttcaagcaattctcctgtctcagcctcccaagtacctgggattacaggcgcctgccaccacgtctggctaatttttgtatttttagtagagatggggtttcaccatgttggacaggctggtcttgaactcctgacctcaagtgatccgcctgcattggtcccacaaagtgctggggttacaggcgtgagccaccatgcccggccggagttgaggctccaaggggtctcggggggtctcagaagctcagctgatgatatcttaatcaggtttgggtttttttttttttctgttagaacaggtcataaaaatactttcaccccaagccacaaaatcctataaaatagctcagtctttgacaaatacagtgaatataaaagagctcttttgagtttctatttactcaagatgtttgcagtgataaaatcttgatataagttttctagaatcttgaactttcaaagctcctttagaaacagtcctttgtgttgtttttattaaactcttcaatgaacacaaagtttttatgttgttcacacaaaatttaaataaggaagctgaaggtaggtgggaacccccaaatggatggtaatagaaaacctcctatagcatttccatagactggtttattcattatgcagcttggctcagcagaaccattttataatgaaactgcaagatgactcccagtgggcaaatcaacctctattctaaaggttgattcttgtcaactgggagaattgattcctgatgagaaatgctagactaaaaaaccctcccacattcacttcacaagccagatccaatatctttaatcctcttatggaaaagaaacaaggagacatttcagggcttacaacagccttccagaataattgcaacagtctcacagcatcaggggccaaaggaatattgacatctttccaactggaaatcctaaaccggttatctggagtgagacaatctatgtcttaaacttggccagagcaccttggattttttttttttttttttttttttttttttttttgacggagtcttgctctgtcccccaggctggagggcagtgatgtgattttggctcactgcaacctccgcctcctgggttcaagcgattctcctgcctcagcctccccgtagctgggactacaggcatgcgccaccatgcctgggtaatatttttgtacttttagtagagacagggtttcaccatgttgatcaggctggtctccaactcctgacctcaaatgatccacccacctcagcctctcagcgtgctgggattacaggcgtgagccaccgcgccaggccagcaccttggattttaaccaccatcctagatcaggaagtttaaatttctctccatgttaaaattttcctttctcatattgttaatacattactatttgattaatacaaattactatttgttaatacaaatacatgctatttgattcaggttttgaagcaaaattcctgataattttaaaactatgagagttatttctttctatgcatcttattgctgaggtcatcttagctgatcattaattggacaatatagtggtaaatccatactggtctttgactctgaaaacattctttcaaattccattggtgctttccactgttttgacacgactttaagatgttatccagactcttctgagcgcaaagaatatgtgtctgcatataaatggcctaacaaaacacaccactctgtctatagccatgaacaggaagtccccatctctgggcactgccagtcacccaagaggacaatgtgaagagctggggttgctgctctagggagaagcttgtgggcttgggcgagtttcagtttgggagtctttgtgacttaagcaggaaaaatattaactcagattactccctttggcctaaaaatcatttctattttttattgtttaatttttgaaatagaaaatgtattcatatggttcaatatttttaaagtatgaaaagataattcaatatttaaaagtctcactcctcataacaactgtagtctctttttttttttttttgagacggagcctcactgtgtcacccaggctggagtgcagtggcgtgatctcggctcactgcaacctctgcctcccgggttcaagtgattctctgcctcagcctcccgagtagctgggattgcaggcatctgccaccacgtccggctaatttttatatttttagtagagacggggtttcaccatgttggccaggctggtctcgaactcctgacctcgtgatccacccgcctcagcctcccaaagtactgggattacaggcgtgagccaccgcgcctgccctactagtctcttttatatctagagattcttgttgaaaatatgactatattcctctaaatctacctcctttattccttcccttaaaacggcctttttttttttttttaggcataaataatatacaacagcctgggcactgtggctcatgcctgtaatcccagcactttggaaggctgaggtgggcagatcgcctaaggtcaggagttcaagaccagcctggccaacacggtaaaaccccatctctactgaaaatacgaaaattagctgggcatggtggcgcatgcctgtaatcctagctactcaggaggctgaggcaggagaatctcttgaacctgggaggcagaggttgcagtgagccaagattgtgcccctgcactccagcctgggcaacagagaccgcatctcaaaaggaaaaaaatatatatgacaaagtgtacacatttaaaatgtgcaatttgatatgttttaacatatgtgtatacctgtgaaaccatcaccacaattggggttagggaaaaaatccatcaccccaaaaagttttcttttttttttttgagacagagtcttgctctgttgcccaggctggagtgcagtggcctgatcttggctcactgcaagctccgcttcccaggttcatgccattctcctgcctcagcctcccgattagctaggactacaggcacccaccaccatgctcggctaattttttgtatttttagtagagacggggtttcatcgtgttagccagatggtctcgatctcctgacctcgtgatccaccggcctcagcctcccaaagtgctaggattacaggcgtgagccaccgcgcctggcctaccaaaaagttttctcatgtatttccctagtgactaatgatgttgagcatcttctcatgtgcatttttgctttacctgtatcttctctgttgaagtatctgttcagatcttttgtgaggacaaggtacggggttccaggtagggatccaagttcattttttcgcatgtggatatcaaatgtcccggcaccatttattgagatggccatcctttctctacctcatcgcttttgtaaccttgttcaatatcagttgtccattgatgtatggatttatttatggactctattaggttccattgatctatctgccctctttaagccaatactatgctgttttgattgctatagctttataacaattttctcttttttggccctaatttcacatttattttatttttaaaattttgacttttattatagactaaagggtatatgtgcagctttgttgcatgggtaaatcgcatgactctgaggcttgaggtcccagcgatcctgtcccccaggcagtcagcatagtacttaactagtcgttcttcagcccatgctggtaacaactttcaaaatcaagtagtgttcttcctccaactttgtttttcttctgcagagttattttggctattttaggtcctttgcatttccagatgaattttagaatcagcttatcaatttttaccaaaaaaagaatctcatgggatttcaattggaattgcattgactctacacatcaatttaattgcctcctcttgtttcttttttatatgaaaggttgtccccatacacacagttctgcacctggctcttcacactccacaatgaatggagatctttcattcttctcccttagctcccattatagtttcattgtatccttttgttgggatggaacttatttcatttaactgtagtgaaactgatggattgctagcttactgctgatattttgctattacaaacagtgctgcagtataatcactgtacgtgtcatttcccttgtgggcaaatatatctgcaggatgaatttgagaagtgtgattgccaggtcaaagggaatatacatttaacattttactggcaagggccaggtgcggtggctcacgcctgtaatcccagcattttgggaggctgaggcgagcggatcacaaggtcaggagattgagaccatcctggctaacacggtgaaaccccatctctactaaaaaaatatacaaaaaattagccgagtgtggtggcacccgcctgtagtcccagctactcgggaggctgaggcaggagaatagcttgaacctggggggcagaggttgcagtgagctgagactgcgccactgcactccagcctaggtgacagagctaaactccatctcaaaaaaaaaaaattaatggttatggctaaatcctttcctagagtttcataatttatatacttttcattaatacattagaaggcttgttttgccatagccttaacagtgcattaccaaactttcttgtttttgccaaattaataggtgaagatggcctatcaaaatcattttgattttcacttctttatttcaggtaagtttaaacattgtttcatgtgttgaagagccatttgtatttctttcttttttttttttttttttttgagatggagtctcgctctgttgcctgggctggagtgtagtggcgcaatctcagctcactgcaagctccgccttccgggttcacgcgattctcctgcctcagcctcccgagtagctgggactacaggcacccgccaccacaccttgacagggtttcaccgtgttagccaggatggtctcgatttcctgacctcgtgatccgcctgcctcagcctcccaaagtgctgggattacaggcgtgagccaccgcgcccagctgtatttctttttttgagacagagtctggctctgtttcccaggctggagtgcagtggtgcaatctcaaatcactgcaacctccgcctcctaggttcaagtgattctcctgcctcagcctccctcgtagctggcactatagttatacacccagctaatttttgtatttttaatggagacagggtttcaccatgttggcctggctggtctcaaactcctggcctcaagtgatacgcccaccctggccttccaaagtgctgggattacagggatgagccaccgcaccccgccccattgtatttccttttttctgactttttgttttcacaaccttggctgctatggtctgaaggtttgtgcccccttaaaattcatatgctgaaatcctaacctccaaggtgatactaggaggtggagacattcagaggtgattaaatcaggagggattatgtctttataaaatagtcctgaaggagcttgttggccccttccaccacgtaaagacacagtcagaaggcaccatttgtgaaccagaaagcatttcctcagtaggcaccaaatctgtcagccccttgacctaagagttcctagcttctgccagaactgtgagaaaaaatttctgttgcttatataaaccacgcagtttgtggtattttgtcatagcagcctgaactaagactcgcacactttttctccattttgccatctttgcttataccttttttctttttcttttttttttttttgccataatggaggttttaaaaatatttatgcatttgaaattactagcctttcctttgaggctttagatttttagtcttaattagaaagtctttccccactccagtatttgaatttcctcgtgattttcttcaaatactttgatgagtttttttttcttttacattgaaatctcttcattatttggagcctattctactacagtgcatgatatctaatttgtttccctgttgtctcaacaccagtccatctttccccccacccacctttgatgccactttatatagtaaatgttcacgtgtttgaggctatttctggatttttctgttctgttccatggaatgtctgtgtaatcatgcatcagaaccacactactgaaactgtttttcaaattataatatggcgtaatatctggtaggagtggtctcacctcattgcttagttttctgacattaatttttccatatgaactttagaatcagcccattacaggaaactgtttgcatttttatgaggattatatgccatttttaagttattgtaggaagaatcaaccctttctagtgtgatttttttttctttttttctttgagacagagtctcactttgtcacccaggctggagtgcagtgatgcaatctcagtttaccacaacctctgcctcctggattcaaatgattctcctgcctcagcctcccgagtagctgggatgacaggtgcatgccaccacgcatggctaatttttgtatttttagtagagatggggtttcaccatgttggccagtctagtctccaactcctgacctccggtgatccgcctgcctcagcctcccatagtgctgggattacaggattacacggtggtgcccggcctcagttttgacgactttccctgatgactaatgatgttgagcatctgttcatatgcttattgaccatttatatcttttttttttttttagatggagtttctctcttattttccaggctgcagtacagtggcgtgatctcggctcactgcaacctccacctcccaggttcaagcgattctcctgtcttagcctcacgagtagccgggattacaggcacatgcccccattcccagctaatttttgtatttttagtagtgacggggtttcatcatattggtcaggctggtctcaaactcctgacctcaggtgatccgcctcggcctcccaaagtgttgggattacaggcgtgagccacccactgtatctcttgttcggaggaatatctaatcaagaaaatcatttttactgtttttattttttggtttgttcgtttttttcctgtgagatggagtttcactcttgttgcccatcctggtgtacaatggcgcgatctcggctcacttcaacctccgcctcccagtgcgtccggaattggtgggttcttggtctcactgacttcaagaatgaagctgcgcaccctcacggtgagtgttacagttcttaaaggcggcgtgtccggagtttgttccttctgatgttcagatgcgttcggagtttcttccttctggtgggttcatggtctcgctggcttcaggagtgaagctgcagaccttcgtggtgagtgttacagctgttaaggtggcgcgtctggagttgttcgttccttccggtgggttcgtggtctcgctagcttcaggagtgaagcttcagaccttcacggtgagtgttacagccgttaaggtggcgcgtgtggagttgttcgttccttccggtgggttcgtggtctcgctagcttcaggagtgaagcttcagaccttcacggtgagtgttacagccgttaaggtggcgcgtgtggagttgttcgttccttccggtgggttcgtggtctcgctagcttcaggagtgaagcttcagaccttcacggtgagtgttacagccgttaaggtggcgcgtgtggagttgttcgttccttccggtgggttcgtggtctcgctagcttcaggagtgaagcttcagaccttcacggtgagtgttacagccgttaaggtggcgcgtctgcagttgttcgttccttccggtgggttcgtggtctcgctagcttcaggagtgaagcttcagaccttcacggtgagtgttacagccgtgaaggtggcgcgtgtggagttgttcgttccttctggtgggttcgtggtctcgctagcttcaggagtgaagcttcagaccttcacggtgagtgttacagccgttaacgtggcgcgtctggagttgttcgttccttctggtgggtttgtggtctcgctagcttcaggagtgaagcttcagaccttcacggtgagtgttacagctcatagaggcagtgtggacccaaagagtgagcagtgacaagatttattgcaaagatgaaagaacaaagctcccacagtgtggaaggggaccccagtggattgcctccgctggctcgggcagcctgcttttattctcttatctggccccacccacatcctgctgattggtccattttacagagagctgattggtccattttacagagagctgattggtctgttttgacagggtgctgattggtgcgtttacaatccctgagctagacacaaaagttctccacatccccactagattagctagatacagagcgtctacacaaaggttctccaagtccccaccagagtagctagatatagagtgtcgattggtgcattcacaaaccctgagctagacacagggtgctgattggtgtgtttacaaaccttaagctagatacagggtgccgattggtgtatttacaatccgttagctagacataaaggttctccaagtccccaccagagtagccagatagagtgtggattggtgcattcacaaaccctgagctagacacagggtgctgattggtgtgtttacaaaccttgagctagatacagagcgctgattggtgtatttacaatcccttagctagacataaaggttctccaagtccccactagactcaggagcccagctggcttcacccagtggatcctgcaccagggccgcaggtggagctgcctgccagtcccgcaccctgcacctgcactcctcagcccttgggtggtcgatgggactgggcgctgtggagcagggggtggtgctggtcagggaggcttgggcctcgcaggagcccaccgtgtgggggaggctcaggcatggcaggctgcaggtcccgagccctgccccgcggggaggcagctaaggcccagggagaagtcaagcatagcagctgctggcccaggtgctaagcccctcactgcccgggctggcggggcccactggctgctggagcgtggggcccgcggacacccacgcctacccagaactcacgctggcccgcaagcaccgcgtgcagcccgggttcccgaccacgcctctccctccacaccttcccgcaagctgagggagccggctccggccttggccagcccagaaaggggctcccacagtgcagcggtgggctgaagggctcctcaagcaccgccagagtaggcgccaaggccgaggaggcgccgagagcgatcgagggctgtgagggctgccagcacgctgtcacctctcaccgggttcaagcgattctcctgcctcagcctccccagtagctggaattacagacgtgcgccaccacactccgctaatttttatttttagtagagacggatttctccatgttggtcaggctggtcttgaactcccggcctcaggtgatctgcccgcctgggcctcccaaagtgctgggattacaggtatgagccactgcacccagcctttactgtattttttagcagaaagaaaatgattgcattacagtggttatttttaagggccccaacctccactttgtcctgagatctacgttgtgttgttttcagtgttttaacaggcctttttatttttataaatgccccagaagttgtagcgcagccctaactttctagcaggacttttagaagctgacaattttcctaagtttcattcacatcacatgaaggcagcaattgttaaaatatatttagattccattagggtacattttgctatcacattgaagtctctcaagaatcattttattcccatcagatgttgttactgagcagtttctagtgctgaacatgactaagaacctttaggtggtgctctttgattaaaaacatttatccctcaaacaacttaaatacagtagtatattgcaggaaaaagtgacctttatttttttagggatgatctcccaggtctgctcaatttttctgccatttctattgcagaggctaataatttgcccatctcctcccagcccaagcaccccaagactgatacttttctatcacctgctgctaattttgcctcccaaagagtctcccatctcgacgcagagagaaccttcttagtggggtcacagcttcccttgcgtccaagagctgtctgtcccacagcctggtcagactcccacagcctcgtcagactcccacagcctcaaaccccaggtttgccactcacttcctcactcactcctctttgctcatttttctgccaacgattcgtcatgtatttctaggactatctgctcacttctcaccccttactttttttgttttgttttttgagacggagtctcgctgtcacccaggctggagtgcagtgtcacaatctcagcccgctgcaacctccacctcccaggttcaagtgattctcctgcctcagcttcccaagtagctaggattacaggtgtgcaccaccatgcctggctgcttttttttattcttagtagagatggggtttcaccatgttggccatgctggtctcgaactcctaacctcaggtgacccaccaccttggcctcccaaagtgctgggattacaggtacaagccaccgtgcccagccccagtccttacttttggttgagggttacctttcctttcattctggctaaagagttgaggtcagttggaaaaacccagactcaatcttccttttttttttttttttttttggagagagtctcactccattgcccaggctggagaacagtagcacaatcatggctcactgcaacctctgcttcctgggttccagcaattctcctgcctcagctgccagagtagctgggattacaggtgtgcaccacctcacccggctaatttttgtatttttagtagagacggggtttcgccatgttggccagactggtctcaaactcctggcctcaagtgacccgcccacctcagcctcctaaagtgctgggattataggcatgagccaccatgcctggctgatctccctaactctaaatctttacccctctgtctctaaagtctggccacctttttaattcttttagagacagagtcttgctctcacccaggcttcagtacagtggcataatcgtagctcactgcagcctcaaactcctgggctcaagtgatcctcccacctaagcctcccaagcagcagggactacaggcacatgccactacactgagatgtttttttttgaaaagacagagtcttgctatgttgcccaggctggtctcaaactcctggcctcaagtgattctcctgcctcagccttccaaagtactgggattacaggcgtgagccacagtgcccggtcctgatcaccttttctccatcaccttttccctaacacttagtttccctttctccatcacttcttccctaacacttagtttccctgtccccgactttctcactactaaaggacccctacattcctctagaaaccttgtgggactagattcttctgtcacataccctattcttaaaaataacaacaacaacaaaagccaatttaaatactttagaagatcatacttttcaaagattttactaaatcatttttttaaacaaaatatacattaaatctcagatttacagaatatagaaataatttatccaaagaaatttgcatttaaaattgttaatattgcacccaacagtatgtctttgacacatttgcattgtcaatctttcccacaatttgcaaaaacaggagagaaatctgaaactaacagaattacacaagctaagttttctgtaaaaaaagaaaaaacttacaattttttatttacaagttaaggaaaagttgtaaacgttcaggattttacttccacagaataaaaagccatacattcttttatcatacctagaaaatgaacatatacacattgtgattacctcataggaattcaacaggactgatattgtgaacattcacagcccaatggtaaaaaacagaattctcgaactatggaaactagtgtgtgaaagacacagaatgagaaaaatgtctggaaaaaaattactttctcctctttgaggagtttccataattacctaaagttatcttcaaatttaaaaggacacaccattccccagtcttaggaatgtggctgccaataaccttttctctcgacataagacaagtgaaaaagagtgaggtctttgttcaagtccctgataaaatactttgcatataggcaggcacaaaagtttgctttccaaaagaaagctttgcaaaatattctgcaatttattactgatatcctcagtttttaaaaaccccctttttaagcccataaatatttatatgctttaaaaaatgagagtagggaatcaaatcatttggtactatgggaagctgctaaaataatatttgatagtaaaagtatgtaatgtgctatctcacctagtagtaaactaaaaataaactgaaactttatggaatctgaagttattttccttgattaaatagaattaataaaccaatatgaggaaacatgaaaccatgcaatctactatcaactttgaaaaagtgattgaacgaaccacttagctttcagatgatgaacactgataagtcatttgtcattactataaattttaaaatctgttaataagatggcctatagggaggaaaaaggggcctctgggaaattatgctgaagatcaccgaaaggaaaatgtaactgtaattttataatacaataccatttgaactgaaatacaacatgctttgtaattctattgccctggattgagactggattaaaacgttccctttcaaccataatgtacataaccagttgaataataggacttttattattattaaaaaattttttttgagctggtgtctcactctgttgctcaggttggagtgcagtgccacgatctcggctcactggaacctccacctcccaggttcaagcgatttccagctaatttttgtatttttagtagagatggggtttcaccatgttggccgggctggtctcctgacctcaagtgatccacctgccttggcctcccaaagtgctaggatgacaggcatgagccaccatgcccggcctatttttaaatttttcttaagacagagtcttgctctgtcacccaggctggagtgcagtggcgcaatctcggctcactgtaacctccatctcccaggttcaagcgattcttctgcttcagcttctcaaataggtgggattacgggtgcccaccaccaagcccggctaatttttaatttatggtagagacagggtttcaccatgttggctgggctggtctcgaactcctggcctcaggtgatctcccctcctcagcctcctaaagtgctgggattacagacctgagccaccacgcccggccgaataataggacttttaaaagtcctatttcttggctctgctattgtttaatagtccaacccaaggagtttgttataaagattatttattgtcttcaatatctttgtgatgaatgcaattcacacacacacacaaagtcctgagagtctttcataaaaaaatagacgtgctttgtggccgcatcccagcctgggggtaagggatcagctgtccccggtgcgcctgtactccgcggtgccatccgccacgatggcatcaagcggcgagcgcttcttgcggatgctgcgcccggaggagatgaggtccgcgtagccccgctggtgcgagaaggcgtaggccgagcgccgcgttgacacgccccggcggaacacctgctgccgtcgctgccactgctcctccgccttcaaccgcttgcgatgcttctggatctgcaagggggagagatggggagggatgaaaataagatccacaccagggaggaggcctggccagacggttgacagaaatgaacactgatgaactcccctgacacctgccccattttgatgcaggcagttctgtccccacttgtgtgtgtgtgtgtgtgtgtgtgtgtgtgtgtgtatgtgtgtctatatctttttttttgtttttgagacagtctcgctctgtcacccagacttgagtgcaatggcacgatcttggctcactgcaacctctgcctcccaggttcaagcgatcctcctgcctcagcctcctgagtaactggggttacaggcacgcactgccacacccgtctaatttttgtatttttagtggagacagaatttcaccatgttggccaggctggtcctgacctcaagtgatctgcctgcctcggcctccaaaagttctgggattacaggcatgaaccacagtgcttggctatatctatctatctatctatctatctatctatatcgacatatatatatgatgatataaatctatatccatctctctatatctatacatagattgattgatcaatcgatctacctacctacctacctggagatatatattgaagccaagggaaggttatttaacttttccaaggtcacacagctagaaaatgcaaagccaagattcccactcctctgaagctagtgcccttttctagttcagaccagatgggtacagtcaaagagaaaattcagtagggcctctttcctgggttgttactgcatactgttggcactgcaaaagggagacccgagggatactgaaggttgcctcagtagcctctactctctccttctttctaatggaaattgattgtattcagattgccccccccaacccctcacagccacatttctcatgggcggtgggcaggttgatttcccttgctaaactagtccagaatgggcaagtgacctaattttggcacgtgagacctgagggcactgtactggggcccttgggtgagaagttccacggcccctaaggagctacagaataggctcttatctccccccgacactgataggtcaggaagtgatacccagaactgctctggccatcttccagcatccatatgaagctaataatgaaggtttctgagagaagagatggcaagaaccagcccaatcctttcttgacaacattaaattgctcaatcaactgggcctgaagcctactaatgattaatgatgacgcactactgtagagatgttttgagtcacagctttctgttccttgtagctcaaaggatcctgctacagaaggtgacatttttcttaaataaagaaaaaaaacccaatctgatttgtatgacaaaatgttaatactgtaattgttaaactgaggagatagatatatggggctcattctgttctcccttttttgtttatgtttggtaatttttgtattaaaaagcaagcacactaaactcccaattccaaaagacttatttgtgagatagagttaaagagaagcaatcatgaaaaatcattcttaccaaacttcccatgagcttagaattttgcaggaaacgtgctgttgggaaacgctttggtttctgtgagggacagagttgggaaaggactatattctttataccttatcactttctgatggccagatggtcattgacaggaatcgaatggcaacgacgggtagtaagcacacagcaacagccaggatgatagttaaccaaatgtatggctgtctcagagcgtttgaagctgtgcctgtaaagaacatggcaaatgcatcactgtggttcttttttcctaagaacatagttaatatttcgccaggtgtggtggctcatgcctgtaatcctaacactttgagaggccaaggtgggtggattgccagagctcaggagttcgagaccagcctgggcaacatggtgaaaccccgtctctactaaaatacaaaaaatcagccgggcatggtggtgtgcacctgtagtcccagctactcaggagacagcagaattgcttgaacccggaaggcggaagttgcagtgagccgaaattgtgccaccgcactccagcctgggtgataaagcaaaactctgtctcaaaaataaaaaataaaataaaaaaaagaacatagttaatatttcataatctataaatagatcatttatggtaaagttttacaactggattggcctccccaaaatatccattatggctcaaagaacagacattttaaaatcagactaagcaaagcaaaattgggaaggtaaattatttgaaacaaggcaaatttacataagtgagcaaataaggaaaaaaagcacatttgttgacattgcattgattaaaaatgcaaagttaggtgatcaagacttctgacttttttttgagatagggtctcactctgttacccacgttggagtgcagtggcgtgatcatggctcactgcagcctcaacctcctgggctcaggtgtcctcctaccttagcctcctgaatagctgggactacaggtgtgcgccaccacgcttggctaatttttgtattttttgtagagatggggtttcaccatgttgcccaggctggtctcaaactcctgagctcaagtgatccacccatattggcctcccaaagtgctgggattacaggcgtgagctaccacatctagccccagtattaggttttatgggaaagaaagaataggcttttatccagccttttaagtcttaagttatctaattcaacacacgtacagcgctattgtaaagctattttaatttgtcttcctcccatcatgttatgccctttcaacccaccatcaccatttaatttccagacaagacattaattttcactagcaataataatttgtatatatttgttttgttgtgctttgttttttttgttttttttttgagacagggtcccgctctgtcacctgggctagagtacagcagtgccatcacgactcactgtagcctcaacgtcccaggtcaagcaatcctcccacttcagcctctccagtagctagaactacaggcatgtgccaccatgcctggctaatttttttgtattttttgtagagatggggtttagccatgttgtccaggctggtcttgaactgctgggctcaagcaatccacttgcctcggcctcccaaaatgctgggattacaggtgtgagccactgtgcccagccattccaccttgtatattttattacttaacagaagttatgtcaaaatctaaactaatgacatttgtctgtacatttatttttggaatttggaaataccaacctgtaaattgaaatgcagatggaaagagaacatgtattccagcactatgaaagtcaaacatgatgccaaaataaagtgcaatgcttccaaaaattgaaaaagcattcacaaaagtccaataagaagtatccaagccaatctgttgggaaaccagagaaaaacagagcactcattttggggagttagcaagaaataaaggatctaacaatcctgaaaacagaattcagcaagttaggcatgatgtggcttgaatactggaccagaaactaaaccatccttgactcaggcaagaaatagaaaatgtgcttggtataagagatgaaaatagcatttatattttgtaagtggcacaggtgcagtgggagtcaggtggatgtgcatgccaccctatatacagaaatataagtaggtaccaatagacactgaatacggccaatgaaagccacgtacctggaaattgactgttattacaagagcagaggcaatggtgacggcaaaagactggtagtcggaaggtgcctctccatcctgccctacggtttgcagataagctccaagaggtatgaagaagaggatcatcgatgttaggaccccatgcaacaagcttacaaagaatctcttatagttgaatagtaagtctctttgtcccactatgtataacccagggaatcggaggctcagtttgtcactcacatccttaaggagaaaacaaaatgatggtattttattcatcaggtcaaagcagtcagagatatgttataattaatatctcacaaaaagttgcagcctgctgttaaattttaggaaggcaaaaactgaacaagataatcgatcaatcctgcaatatttgtggtgtgcagagctcaacctcattgcttagaccaccattacttaatatttaattcagagaagggctaggtataagtttattactttgctacttatggaaagaaaacaaattagtaatgtccaaaaatatgtagggaggctactgtttttacctcctgagtgaatatatattgttgcaaatcctttgggaaaaaattttctcatacaagttgatgagttaattataaattattactttttagtctttatagtgcttctttctttttaagaattggtattagataaaaatatgcactagctacataaattttggaaaggatttaaactgactttaaaatgagtaaattattattgtggagacatattggactctcgggtgcctttttttccttttcttttctttttttttttttttttttggagacagggtctcactttgttgcccagcccggagtgcagtggcacaaacacaactcactgcagcttcaaccttccaggctcaagcgatcctcccacctcatcctgccaagtagctgggacttcacaggtgtgcactaccatgcccacaatttttaaatttttctgtagagatggggtctccctatgttgccagggctggtctcaaactcctgacctgaagcaatttgcctgcctcagcctcctaaagtgctgggattacaggcatgatccaccatgccctgccttcaggtatcttcatagtaagctcttactgtctaaaaggaacataacaaatatgtgtgccaatgaattcaacccagtcacagaaatcctcttttctctttttttttttttttttttttgtcttagagatggggtctcactttattgcccaggctagacttgaacacctgggctcaagtcatactcctgcatcagcctcccgagtagctgggactacagagaaatcctctttccttattacaaaacaagaagcacagccatgacccttgatgcctgacaacagaattataatagggtttgatcagaaagaagtaaacaccagaagaatgcattgaaacgtttgcttgggacttctctaacgcattctcatctgtccagaagtgtccctgcttgtgcgaggctcctacctggtcgagcagccccatgaggagcacgggcaggctggtgtacagcacgttgtagagggtgatgaaccaatcctcgtatgcagtctgtgaggggatgacagaggctccatgtcaccaacaaagacacatgccagcctagttagcacatactcatctgcttcctttatttaacattttgtttgtttgtttgttttaatagagatgggggtcttgctatgttgcctaggctggcctcgaactcctggccttaagcgatctccccatctcagcctcccaaagtgttgggattataggcaaaactctatgcacctggcctgttatcaatattctttttttttttcttctgagacagagtctcactctgtcgcccaggctggagtacagtggcgtgatcttggctcactgtaccttctgcctcccaggttcaagtgattcttctgcctcagcctcccaagtagctgggattacaggcacacgccaccatgtctggctaatttttgtgtattttgttgagacggggtttcaccatgttggccaggttggtctccaactcttgacctcaggtgacccgcccacctcggcctcccaaagtgctgggattataggcgtgagccactgcacccagccctgttatcgctactcttaatgtcaacatgaaaaaataaccaaagataaagataaaaacatacaagcaaatcccctcctttttttttttttttttgagacaaagtcttgcccaggttggagtgcaatagcgcagtctcggctcaccacaacctctgcctcccaggttcaagcgattctcctgcctcagcctcccgagtagctgggattacaggtgcctgccaccacacccggaaaatttttgtatttttagtagagaccaggtttcaccatgtcggccagactgatctcaaactcccgacttcaggcgatccacctgcctcagcctcccaaagtgctgggattacaggcgtgagccaccatgcctggccaaatcccctcctttctaaggtaaaatgtttttacagcaccagaaacatttagagaagtcatgatcattcttaattatgccccaactgtaaggagacacagccccaaaactacaaatatagaagaaataaattgtcttttcagaactagatttttattcatttaagagctctacttagtaaataacaataataacaacattacattacctgcgcagagtagccattgaagaaggagtaccagaaatgaaccaaagtaaaggcaaagtttttgtaaaagaagtatcgtaggaacttgcacatccttatgtaagaccatcggccatgcaccagcagtagcctctgcagatatcggaactgagcaaaggaatagtcactcgacatgacagcttgcattccttcttgtccacttattccaacgccaatgtgggcagctatggggcagagggagaaaacactgtggatcataaaccgattgtgaggcaaaacatcagttgataaaaatggttccatagcaaacaaaaaacaaagacagacattgatggaacaataatacagaagctcttgctcaccatccctcacccccagctcttgaactcaactcaaagtctgagttacaagttgctaaacagagcacacagtagggcctccataaatatctgggaaaggatctcatgtgggtgacgaattccatttggattatctgccaagatcacagccatcccttccatccacagggtgagccccaggcacccatgtgtacactgtgtccttgcctctttggcaacagctgtgtcagtcatgggcagatatgtaatttgtggtagatactacaaatcggctcccccaacttcattccatccttgttctaattagagaggtgggaaaggaaataaaaaccctacatttcccagactcccttgcagctaggctctttgtgaattaggttccactgtttagatccacttatgacttggaagcagaagtgaatcagagcccagcatcgcttcctcttttgggatttctgcagcagagctcatatctactttccagctacctggatgttgacaggcaactataaaggcttcttaatttggaagctctttagaggaacctcttatcacttaccagaagagtagaagctcttctggtaagtgacccagcctagaccctgcttctgtagaccatccagagcttttgaaagtacctagtcccctgtatgaatcttttcttgcttaaataccaactggggtctgtttcctgtgctaaaccctgactgacagaaaacccaagctgagccagtctctctcttgatattctggaattagaagtcagttattttgtgtctagaattttaaggtctaaattcttgaggtaagaaatagttatatttctttctctctcttttttttttttttttgagatgaagtctcactctgtcacccaggctgcagtgcaatggcgcagtcttggctcactgcaacctctgcctcctgggttcaagcgatactcttgcctcagcctctcgagtagctgggattacagatgtgcgccaccacacccagctaatttttgtagagacggggtttcaccatgttgtccaggcaggccttgaactcctgaactcaggtgatccacctgccttggcctcccaaagtgctaggattacacacatgaacaactgtgcctggccgaaatagatatatttcttcctgaagatttctaaggggcagagaaataaagtagtggggagagaggggtggggaggagggagagaatggagggagagaatggggggagagaagagtggggagagaagagtggggagagaagggagggaggggagagagagaaggaggggaagaaggaggaaagggagagagaaggggagagagacagacagacacggggttcctggtgcaaatctatgtccttgttccagtatcttcctgaggcctggcttcttcttggacaacaggaggtgtttaaataaatttacttttttcttttttttcttttaagttacaggatacctgtgcagaacgtgcaggtttgttacatgggtatacgtgtgccatggtggtttgctgcacctattgacccatcctctaggttccctcccctcgtctcccactcctcaaatttaattttttcttaagctagctttggttgttctccaatacttgtaatcaaaagagttttaaccaagaaactattaaactttcaaagtcttattcatggccctctgggaccttaagacattttttttttctttacgggggaaggtttccagaatatataaaattaaagtcacaattttatttatgcttccaatagtcataaataacactttcaaattagagaatgattagttttgtctgggtcttaaaagtaacgaatgtgaagatagacaagatcatttagaaaagatatgttggagaacacaacctatcattgctcagaccctgaaaagtggctgcaatgctgcggcgttccaactaaaaagaagcttcaaaaatcctgccctagttacagaacacaaggtctggcaaattcaaaacataactgtagtgatgtatccaaacctacgttttcagtaacacttctaaaaaaacagaacaaactgcatctcatataatatttatgttctctttgaaaacacacaaatatttcctatgaccagcatggttgccaaacttgctctttcctgccaaaccatggccttttctttcctgaacaagccactgaggaaaatgctgagattctcttggcttatgtggctgaggaagaggaagccctgccccaggccctggtatccagtcctcaaccttcccgctgagcagaccaaggacaaatgtgaaatgaacactgtcatagttcccagggcaaccaaaagcactgaacagatacactataaggtaacattggtcttttttgtaaaatttaagtacaggcatttagagtttcctgaaatctcaaatgcggtgttaggtgcctcactggtagacattcttttatcattccttaacaaaaagaatatttcctcgctacagcaataatccctcttgcctttttttttttgagatggagtctttttctgtcgcccaggctggagtgcagtggtgcgatcttggctcaatgcaacctctgcctcctgggttccagtgactctcctgcctcaggctcccgagtggctgggattacaggtgcccgccacccccatgcccggctaatttttgtacttttagtggagatggggtttcatcatgttggccaggctggtctcgaactcccaacctcaggtgatctgcctgccttggcctcccaaagtgctgggattacaggcatgagccaccatgccccaccttgcctttatctctctcctgcttcacgtacattctcagggtctaagaccaagaagagacaacatccacccagctggtatgagatatcttcaggtaggatagagggagaaggcagcctatgatagtccttggatccttgctaggggcagaaacatggtgggtcatgattccttcacttcttccagactacactgctaaacgtgaatgttagcaaatgctcagattattttttgacacttgaataatttcactcgactactttatgaccaacaatttctttgtgtgtgtgtgtgtgtgtgtgtgtgtgtgtgtgtgtgtgttcttttttgttgttggagaaagggtcttgctctgtcacccagggtggagtgcagtggcacaaacatggctcactgtagtctcaacttctcaggctcaagtaatccttccgtctcagcctcccacgtagctgggactaccggtgtgtgccccatacttggctaaactttctgtatattgttattgatgtggttggaagaaatgacagcttttacaaagtacataaaggcactaatactacttgtataacttctaaggagacccctaaagtttcctatatttttatcccaaagggatgctctataacttatatataaaagtacctggggccaggtgaggtggctcatgcctgtaatcctagcactttgggagactgaggcaggcagactgattgagcccaggagttcaagaccagcctgagcaacatggcaaattcccaactctacaaaaaatacaaaaattagctgggcatggtggctcatgcctgtagtcccagctacttgggaggctgaggtgggaggattgtttgaggccaggaggtggaggttgcagtaagccaaggtcatgccactgcaccccagcctgggccacagagggagaccttgttttttttttaaatgcacctggcatataacagtgcttaataaaaattttaagacaacttaagaaaaacaagcccctctaagattatctacattgactttgtgcaatccctctcattatgtattggtgaactcagaggaacaaaatgtttcaagtctaagtcacataatcagttgataaatctccaaagcaaacccgtcccctcccattatctagaaggctactttataactgaataaaaatcatgtttgacttgtccttttggcacggctagttacgttaaaggtacgtaatggaaaataaactagagctggctggctatggaggaaagagatagatctaactccgagcaagcaataccattcgcatggtagggcaagcacatgcaaaaaaaaaaaaaaaaacagtgtggatgaattaaactgctagtgaccacagacatacgcactgataaagaaggcaagatgacatacgtcatacagctgactcctgttgaggaagataaagttggaatattcttagtatacatcaaggaggaggaggagactaagaaaagaaagagacagactcatgagtcacaaaatagactgaaaagtctagttatatataatgcatttaagcaacccagcatcacaggaacatgcaattacctatgtacagtcaggtaatacttcagctcagtgataataatacgacagagctggaggtgacattagggattattttcttttccgatgagaaaactgaaacctgagcataagcccaaggtgacaccggattttggcaataggatgaggatgaatatccaggtcattagtttgagtatttttaatacaagatactcccttatagtgacagagggaggaaaaaggaacagaattcagacatagagatgagggctgtgggtgtgcttctgcaggctttaataccagcacaactgtatttctgcatggcaggactcaatattttaattgtgtggacttaaattctagcatccagaaaaaggcagccttctagggaggtgaggaggatgatgagagcacgtggaagcttttcttcagtgctaaacatgttactctaaactcacaccaggtgacccaatgatgaagttcccacagatttaccaaaggtaggaagaaagtcccagaaagaaatgcttagatgaaggagaatgatattgtcaaagcaagcaccagccagagttcaataatttatgtcttacaaaacttattaaatatcagggttttttgttttgttttgtttttttgagatggagtctcactctgtcgtccaggctggagtgcagtggcacgatctcagctcactgtaacctccgcctcctgggttcaagtgattttcctgcctcagcctcccgagtagctgggattacaggtgtgcaccaccacacctggctaatttttgtatttttaatagagacggggtttcagcatcttgatcaggctggtctcgaactcctgaccttgtgatccacctgcctcggcttcccaaaatgctgggattataggcgtgagccactgtgcccagccaatatcagggcttttaataaacccaaaatatgggaagagaaccagtaagagagaaaaaaatacacaacatctatataaaagaataaaaatataaggataaatttccccccatagaccttattttcctcttcgcatccttcagaagccctgtcagtgatactctttcctcctgatgggctgtgggctttctgggggtagggtcacaggcgttgtcatggttaagtgactttatgaaacatctgctctatgaaaacctaagctgtaaaatctaaaaaaagaaaatccaccccctacacattccagccatttctcctctctagcacgttgggcctcactggccgtgggtgcatgactcacttttgatcatgttcacgtcattggccccatctccgatggccagcgtgatggctttcttgtacctcttcaccaggtccaccaccatggccttctgcttgggggtgacgcggcagcagatgactgcgctgcactcgcaggccaggtccacaaagtttttctgccgctgctctttcttagcttctagcctccttttactttgggtccgcatccgtctttcttcttctgttcttgggaacttcagcttcagaatcttatttctcttggtctttttctcgagaagaatttcattctgtgaaatcagagagggaaaaggttacattcactttagttttaccccaggagtaccattcccaagatttaaattatgtgaaggataatttttggattatgtcactgattatatttgacaaataaatttgattttataaccaaaacatgtatatatatgtgtgcgtgtgtatgtatatacacacgcacacatatatgtatgtgtgtatgtatatacacacacacacacacacacatatatatatatatatattttttttttttttttttttgagatggagtctcactctgttgccaggctggaatgcagtggcacgatctcggctcactgtaacctctgccttccaggttcaagcaatttccctgcctcagcctcccgagtagccgggactacaggtgtgcaccaccacgcctggctaattattttttttgtattttagtagagacggggtttcaccatattggccaggatggtctccatctcctgaccttgtgatctgcccgccttggcctcccaaagtgctgggagcacaggcgtgagccactgtgctcagctatatatatatttttcaatggagatggggtcttgctgtatagcctgggttgaagtgcagtggctattcattcacaagtgtgatcattgcatgctgcagcctcgaacacctaagctcaaaccaccctcctgcttcaacctccagaggagctgggactacaggcgcatgccaccacatccagcttataaaatatatatgcaacaaaaatttagaaaatctaacaatctataaagaagaaaatgaaaaaacccattaattagtaaaccaagataaccacttttacctctttggtatacatcctttcatatatcatatattattaagtctcaaacttggaaaaaccacactttcatgtataggctaagagacttttaggttggcagttaacatgtgaaagcatctaaaagtggctccaaatgaacttctttcttttgagttaaaggcacagatacactaatgatacgtaccaaccaagaaccagtgatgattaaggcacggtttccaccgggtggaaaaaaagattcctgcacaggaggtgcaaactttgcgtagacgccacctctattcctctggttttccatccttgcatgaagaagagaactaggggaaaccaaatttcagtgtttaaagtgtaagaccctaaataggcccttgactctgagataactttgacttaaaaaaaattgtgacaaaaaaacaaagtttaccatcttacctatttttgtttctttattttattttcattataatttttttgagagagggtctcactctgtcacccaggctggagagcagtggcatgatcatggatcactgcagccttgacctcccagcctcaagtgattctcctgcctcagcctcctgagttgctgggactataggcacacgctatcacgcctggctaatttttgtattttttgtagcaatagggttttgccatatcccgggctttgaccatttttaagtgtacaacttagtagtgttaactatagtcacattgttatccaaccaatctctagaactttttcatcttgcaaaacggaaactctatacctattaaacaataacacctcacctcactcgccctccagtccctggtaacttccagttaactttctgtttgaatgaatttgagcactctagatacctcatatatgtgaaatcaaacagtatttgtctttctgtgactggtttatttcacttagcttaatgtcttcaaggttcatctatataatatatgtcataatttccttcctttttaaagttgaatatattccattatgtggaagcaccacattctgtttatccattcactcactgatgggcacctgggttgcgtccatctcttggctgctgtgaacagtgttgctgtgaacatgggtgtgcatgtatctctttgagatcctgctttcaattattttgtggatatacccagaagtgggattgttgcatcatatggtaatcctttttgaaattttttgaaacatcaccatactgttttgcatagtggctgcaccattttatatatttcatcaacaacacacaaaggttccttcaacaatgattgttattttctattgtgttttgtttttgatagtagccatcctaaagggtgtgaggtgttatcttgctttggttttgatttatcttcccctaatgattagtgatgatgagcctcctttcacatgtttatcagccatttgcatgtcctctttggaaaaatgtctactcaaagtgctttgcccattttttttttttttttttttttttgaggcagagtctcgctctgtcaccaggctggagtgcagtggtgttatctcagctcactgcaacatccacctcctaggttcaagctattcttccacctcagcctcccaagtagctgggactacagacgggcaccaccatgcccagctaatttttgtatttttagtagagacagggtttcaccatgttggccaggatggtctcaatctcttgacttcatgatccacccgcctcagccccccacagtgctgggattacaggcatgagccaccacgcctggccagcccttttttttttttttttttaactgagcgacatgtaattttactatgtctcgattcatccaccatgggggtaccatgtaattcatcatttttcaaagacagtcaaaggaagatacagttgaaaatgtatacacagcaacagaagaaaggcaatcttaggccaggcactgtggctcacacctgtaatcccagcactttgggaggctgagacgggcagatcagtcgaggtcaggagttcgcagccagactggccaacatagtgaaactctgtctctactaaaaatacaaaaattacccaggcgtggtggcggtgcctgtaatcccagttacttgggaggctgaggcatgaggatcacttgaacccaggaggcggaggttgcaatgagccaagattgcaccactgcactccagcctgggtgacagagtctttctaagaaaaaaaaaaaaaaaaaaaaggaaaggcaatcttgatctgaattagaatactggctattgtttgttaggaataaacttattttcatataaacaaaactatatctgtgtttgagaaattctcagtgctttatatcaacaaattaaatgtttgtgttaaaatgatatatgtgacaaggctacgtgtaacactttcatgtgatagaaaaatgagtcatgaaattttggagtggaagggaccttaaatatcttgtccaatctcttcatgttacaaataaggaaatcaagccagaggaaggtgatgtgatttgcctgctgcaggttgataggaaaactagaatgaggactcagttatcttgtaacttctggctcaggactcttactattacatacaaaaagccattgttcttctccttccaaagaaggcttctcagcctttgcactcttgatgtcttgggcctaataatcctttattttgtgtggccatcccttgcactggaggatgtttagcaacatccctggcctctacccactagaagccaggagcacttctctgcagctgaaacaagcaagtgtctctggacagtgccaaagggtccctggaaggcaaactcactccccacggagaatcactgcactagaggattaagtatctagtatcccttttccacatcaatttaattctcattttcaagttaaaagtgagtgactaagacaaatcattgaaaggccgtaagagaaaaaaaatgaagataccttctattcaaatcattttataggaatcatcaatttaagagccacctgggaagatgattcctctctctataaaggtaaactcagctaagggcatggtcacaacatttgctacttgcatacattttatcttttactttagcttcgggaccaatttttaagactttcaaaagagagaccagaaatttttttacagccccatctacaaaaaataaacaaagccatatagtaattaatcagattacttgaagcccaaaactactaaagtaaactcattaagcattaagcatttatttgtctgttgctactttttttttttgagacggagtcttgctctgtcacccaggcaggagtgtagtggcactatcttggctcactgcaacctctgcctcccaggttcaagcaattctcctgcctcagtctcccgagtagctgggattccaggcacatgccaccatgcctggctaatttttgtatttttagtagagacggggtttcatcatatcagtcaggctgttctcaaaatcctgacctcgtgatccacccgcctcggcctcccaatgtgctggtattacaagcatgagccaccgtgcccagcctgttgctacttttttaaaacctaaaagcacaaaggggcatggcttatgtacctctatttgggcacataaactaaatcagttctaaatggaactgatttagatcataaggctactgattttgtctaatttgacggaatacctaatatactagaacaactagaaaatgctttatcaccatcattagaaataagactaatattgaccatcaattccctcatcactttatcacacctggcaaatgtgtatgttaacagtttaatctgacctcatgctggcctgagagaagctctgtagggaaaaatcttgaggaactgtcaggccatcagtaaacacatcacagtaactgtgtgcagcatatttatagcttcagaacaagacagggctttttcatcatacatttccaggtctgctgcgactctgattcaaagctaacaaacgtttcagcatatgctaacatttgaattatcaggcctgccccacctagactagattacaggggacctacatgatgtaacccacccacacatttccttcccgcaaaagttttgggttttttttttcctttcttctatttccctttcaaaagtaaaagttcctagaaaaagcaaaataggactataattcatattaatttgctagcgatattacaggctttttacggaatttttagtaggtgaaccgagttttttttttttttttaatgagacagagtttcactcttgtcacctaggctggagtacagtggcgtgatcttggctcactgcaacctctgcctcctgggttcaagtgattctcctgcctcagcctcccgagtagctgagataacaggcaccgggcaccacacccagctaatttttgtagttttagtagagacggggtttcaccatgttggccaggctgctctagaactcctgacttcaggtgatccacccgcctcggcctcccaaagggctgggattacaggcatgagccactgcgcctggcctgagctgagaaggaatggagaaaaatggcctctgaagggccccaagtttccctaaaagtaaaatctgctcaaatttaggctgcaccttgattacttggaactgcctgttgttgtcttgcctcatttaaacatgaggaaactgccccaagtgacacatcgtaacccctatttcttcatatctgctatcttctacagacagtcttgcatttgcaaagatgagctattacgtaatttcatactgcaggcttttactcacttaatatcctccccatagcagatggtggtgtcttcagtcagaagttcacaagcaaatcctatattttcagcagtttctacaatagaataaaattaagtcaaatgtcattcctgctgtttttattttattttattttgttttttgagacagcatctcactcccactgcctaggctggagtgcagtggcacaatctctgctcactacagcctcaacctccaggattcaagtgatctgcccatctcagcaccacccgcagcccccaagtagctgggactacgcaactcgctgccaagccaccaaacaatttgtgttttttctagagatggggttttgtcatgtttgccaggctcattcttactgttgaactgaataattgattttacctagtaatgatattttttagttcatgaacataaccagattcacacaaacacactatttttctatagcaatctgtaggaatcacatgcagaagaaaaatccttttctccataataaaacaagtgaaagtcaaagtctaatttgaaatgttttcaataataaaatgtgctatattatcaaacatataaactggttatttagtaaaccaatgttcattaaattactaaacactctcagttcctggttcaattactctgttattggcggggggcgggggcagagggaagcataataatttccaccaacccttacgtgaagattttttttccttttaaattaccacccaatttggcatttatttaaggtcagggctgtgcttcccataactttgcagagtgtgtaacccgttgacgatttcagcgcaagagacattatttgatttcttgtggaaggcttacaaagtaaagtatcaataccaaacaagtgcttgttgagttctaaagttaaaaaattaaaatcgttctttccttaggtatacaattttattgccaagcaataaaattggcaagaaaaccaaagttattgttcagtactttgtattgttctactctgtgcccaccaaatgtcaaagcactggaaggacagagggacaagagggatggccctttcaggacgggaacccacgtctggctggagagataagaccaattataatcagcaagacatggccaggagctaaattataaggaagaaactgctactgagggggatcaggaaaggatgcagaagaatgtgctggaaaaacagaggagggtttctcagaaaaagcatcttccgtccaaagaaacagtgtttgtacaggatgaaaagtctgaggaggtcatcttgggcaaaggaaacggcagctataaatatttgtgaattaacagatatgcttccctgcacaatgaattaccctttttgtctccagtaagcacccagatcttaatgtcagcttttgcaagttttgaaatggtttctggaactccatcctgtagcttgtcttcaatagctgtagctcccaggagctagaatgtatattaaaaaaaaaaaaaaaaggaattagcaaacaaaccaaaagttttctgtaattacaggttgccaacctgtaaaaagaagggctaattatacatcctggttgctgctctcctggggccaatggccagtgttaacagggaaggctgccatgtttcacaattactgcaaaccaacacacctaaaaactttttccctaaaggatgaactatttaatttaccaagacaaaaatgcaagtacaaaatcaaggatgttaaaaatacacttttcttgtgtatttgtggctttatactgacataaaccgtaaaccagttgcaatactagctatttgttgaatattttccacttatctaaaccctacaaaaactatgtattaaatttggaaaacttttagaaacaatatatttttcttatttcaagattttgcagaatatgaattgtttcggtaattcccccaatgtaataagtattagatgcaggtttgttattgtttaaaaattataataaattttaataagtgatatacaaattatggaattaaattagaacttctcctaatgtattttgtcttttggtttctcataatggcaacttctgttctgctcctattttggtgaataaaagaaataaccttcttccattgtgccagtgtcaaatgctgaagttacaattatctcttaagcatgagatcaaatattcaataaaacttaataaaaatttcaattctgcttagaatatcaaagaaaaagttattaaggctaaaactcacaattaagtctttttcaatctcctcatatactttatccagagcttcgtcccggttggtggaggccacactggcagccataaactttttattccattctgtaaattctttttcttcaatttccttgtagcaaaggcatagggttctaagagtttcatttgcaaagatctgttttatttaaaaaaataaatccaccaatgcaaagaatagttaatttatgtaattcaggatcaagtctgaaattttactttgaagtaatatactaacagaatttaaaaagagatcattaaacatgacagattctgtacaaatacactttagagaggggattaaatgtcactttttttttttttgagacaaggtctggctttatcatccaggctgggatgcagtgatgcaatcccggctcactgcaacctctgccttccaggctgaagccatcctctcacctcagcctcccaagtagctgggactacaggtgtgcaccaccacgcctggtaatttttgtacttttttttgtagagatggggtttcatcatgctggtcttgaactcacgagctcatgtgatctgcccaactcagcctcccagcgtgctgggattacaggcatgagccactgcacccagcctaaacatcactttataatagactttgcttttctaaacttctatagggtccaggactgcacttccagtttccaaagggaaaagcttacctttcttctaaatcttctattacctttctcattttctcattttctctttttctcttcatgactaggaaaatatcagaccaagggagctgccttggggtgtaatgacataagcacgaacctgacaactttataacttgttccaacaaactgtgatacaagtccaatcacctatgaactctccactaagcattattccctcaaaccaattctaaaatacacaagccattgttaaagctgaggtcaaagcttttaatggaaaagagtatctggcaattttcccatgatgaacgattcaaacattttctttttttttctttttctttttcttttttttttttttgagatgaagtctcactctatcgcccaggcttgagtgcagtggtgcgatctcggttcactgcaacctctgcctccctggttcacgccattctcctgcctcagcctcctgagtagctgggattacaggcgggtgccactgcatctggctaatctttgtatttttggtagagacggggtttcaccatgttggccaggatggtctcgatctgttaacctcgtgatctgccacctcaccctcccaaagtactgggattacaggcgtgagctactgcacccagcctgatttaaacattttaaacagtttcaacatgaaccagtaaacatctcattactttatagtcacatcttttttattttgaccaagttttgctcttgtcgcccaggctggagtgcaatggtacgatctcggctcactctaccccctccctctggggttcaagcgattctcctgcctcagcttcccaagtagctgggattacaggtgcccaccaccacacccagttaatttttttgtatttttagtggagacggggtttcaccacgttggccaggctggtcttgaactcctgacctcaggtgatacacccgccttggcctcccaaagtgctgggactacaggcatgagacaccaaatactcaatcagttgaaccgcttctgccatcttggctagacaagatgtgacctatagtcagctctgtcatcctgtcacatatgaatgctttccttcctttgcactacaacttgaagttagtggaggtcttggggaccacacacatagtaagactacaacctagtatggttatgtagcttgctcaaggccactggaagagagctaagccattcccctgcctcagtcctatagaccttgaagacccacatgctgggagagggcaccatggtgatatcccaggaagtcagtggcaggggcagaactgggacccaggtggctgtattcctactttactgctctttccaccccaactattgcaaagcaaagggagggtcagcagttaacatacagctttcatgcaaacttaacagacagcatcagagagtaagttcagaatcccttgcagaaagaataaaagtgaaacttacatccagggcatcctgtgtttcttgcttagtaggattcattcgatgtaaccgttcataaataacagtgtcagcacctttacagtaaagcttgatattgccttctggggttcttactggtagtaaaagaaggaaataaacacaacaaagtttgattttttatatatatattttttgagacagggtcttgctctgttgtccaggctggagtgcagcagttcagtatcggctcactgtagcctcgaccccccaggctcaagcaatcctcccatctcagcctcccgagtagctgggactacaggtgcatgccaccatgcctggctaatttttatttttatagacattggaggtctcactatgttacccaggctggtcttgaactcctgggctcaagcaatcctcctgcctcagcctcccaaaatgctgggattacagatgtgagttaccacacccagctaagtttgattttttaatagaaaactacatttataaagttaatttgaaatgttactatctcataattcactgttagcttaaaaccatcagttcctctagaaaagtgttgccttcaacaaaactggtaagtcattatctacattgaatgtaatagtgaaataaatataaaaagattccttcacagtcagctctgttttttataacctcagttattcttccaacaaatatttactgactccctaccatgtgctatgccatgttctagttactttcttttgtagactttttctccatccaaccaacaggtagtttctcacctatgaactcacaacacttactgcttttaatacttcgaccacaacaccactcctaatgaccattttttttgggttttttgattaatgcaataattgtaatacatccctcactgttaaccagattttaaatcaaggtagatggcaagcatgataatcagtctagatctgtgtaagggacacagaaagcgttcagtaagtgtgcctaaggagggtgtaatagttaaacctgtatatttttattggttaaaaattcaatcatagtggagaaggcttgtagataccaccttaaccaagtgatcaaagttaacatccccattaatgagacaaaccaataatatataccttctggctaggcagggtggctcacgcctgtaatcccagcactctgggaggccaaggcgggccagtcacctgaggtcggcagttggagaccagcctgaccaacatggagaaaccttgtttctactaaaaatacaaaattaaccaggcatggtggcacatgcctgtaatcccagctactcagaaggctgaggcaggagaatcacttgaaccagggaggtagaggttgcagtgagccgagatagcaccattgcacttcagcctgggcagcaagagtgaaactctgtctcaaaaaaaaaaaaaaaaaaagtatatatatatatatatatatatatatatatatatatatatatataacatgtatatacacatatatacatacatatatctacatatatacacacatatataaatacatgtatatataaatatacatatataaatatatgtatatatatataaatataaatgtgtgtgtgtgtatacaccttctgatgtgatacttaaagaaaagcacagcatcacttacggactcttcctgccaacaatgtgtaacctagctctaatcatgagggaacatcagacaaacgcaaatggagggatagcctataaaataaccagcctgtgctttttaaaaatatcaatggatgaaagatcaaaaagagattgaaccgtccttgactcagagtcatgatcacctaatataacctgtgatcttagattggatcctggaccagaaaaacaaagaatgaacctccctggtaaaatctgataaagtctattgattagataatattgtactgtgttaaattttctggttctgaacattgcactgtatatataagtgagtgcttctgttcttaggaaatacctactatggtatatagtacagtatttaggggaaagggacattaggcctgcaatttattctcttttttatatttttattttctttttttatcatgtaatcttgctccttctaacgcaatttactctcaaatggttcagaaaacaataacctgtatgtatgtgtgtgtacatatatatgtgtgtatatatataggtatatataatgaaattacatatatataattagatatatattagatctatatatagagatatgtaaatgaaatttcattatgttaacaattggtggatatggaagagtatgagggctctttaaaccattcttgtaacttttctataagtttgagattatttcaaattacgaatttaaagcagttcagtggtaggaagtgattttcatcttcacttggtggtctgttatgtgcctgcattgcagatatgattttgattcataagcatagctttgcttttctcagaaatcttttcctgctgagtcctcccttccctgccatcaagtacagaagagagcactcagaggtgctcaaaaaataaaagagcatgtgttgtttaaaataaaagactgctacaaatgtctacctgctgcttcagaaatgttccacctgctgccccagattcagcatctggcagcccacgtggttaaagaatgtcagcagctgtaatcccagctactcaggaggctgaggcaggagactcgcttgaacctgggaggcggaggttgcagtgacctgagatcgcaccactgcactcctgggtgacggagcaagactccatctcaaaaaaaaaaaaaaaaagaaaagaaaagaaaaaaaagagagggattaaaaaagaacgtcagcagcatttgcaagattcagagatactgtggctacccctttgagtagggaacacagtgaagaatgaagaaaacaataccagtttcttttttttttttttttgagacggagtcttgctttatcgcccaggctggaatgcagtggcgcgatgtcggctcactgcaagctctgcctcccgggttcacgccattctcctgtctcagcctcccgagtggctgggactacaggtgccagccaccacgcccggctaattttttttgtatttttagtagagacggggtttcaccgtgttagccaggatggtctcgatctcctgacctcgtgatccacccgcctcggcctcccaaagtgctgggattacaggcgtgagccaccacgcccagccaacaataccagtttcagtaaagctgcagaaatctcccaggagccaagtagctctttcactggctgctttatcctgatgccactcaatacaatgggcacaagcaacatctaaatgagcgattcatagacagactctgagggggacttaccaatgatagacattcgcttccggtcactgttgaagtccaaaatggcaagaacattgtaagtcctttcagtgcccagttcactgatggtgatggtgttctgggtcctggcgaggaaggcaaagccaaagttcctggcagcgtttaccagggcaccttcatcgggagaggctgcctggtagttgagctgacctaacaaggaagcgagagaaatcccagaaaagctgtaaaaacaaatgcagagctcattgttgaggcctctgctgaggctcctgtgggggtcagatgggctgcaaagcccaaaacatccccaggaaaacgagtcattgacttggaagggttatgccaagattaaaacttctttgttttatcttgacttataaacagtaatataaactaaaaaagaaacattggtggagaatgagggaaaattcccataatcccaccatccacaggagaaacaacaggtgttgacattttatcattccctccagtgccttttaaaatgtctgtatctgaaattgtttctatcaagctgaatatacatttacatcctgattattttaatgctgtatctgagcatattgccatccctttttaaattctttataaacatttgaacaaatgtaaatatgttatcattttcccattacagacacttaatttccaaatttttttactctcaaaaagtcacactttaataacccttttgtatgtgtgtaaagatttttctgtttcttttttctttttagagacagaggtctccctatgttgtccaggctgctcttgatctccggggcccaagtgatccttctgcctcagcctaatgagtcgctagggctacaggctcatgtcacctcacctggcttattctctttctttcttgtttttctgaaacagggtctcaccgtgttgcccaggttgcagtgcagtggcacgatcatggctcactgaagcctcaatctccccaggctcagtgatcctcctacctcatcttcccatgtagctgggattactggtacacgccaccacacctggctaattttttgtattttttgtagagacggggtttcaccatgttgctcaggctggtctcaaactcctggactcaagtgattcgcctgcctcagtccctaaagtgttcggattacaggcatgagccactgcccctgggcccctggcttattttctaagagcagattcctattaggaaaatactgagccagagaacactgataattttaaaactcattggtatacaatactaatttgttttccaagaaggttgtaccagtttatcttccctctaaaaaagtatgttttctttctttctttcttttttgtttttttgagacagtcttactctggcaccaaggctggagtgcagtggcaccatctcagctcactgcagccttgatcgcttcaggcgcaagtgatcctcccacctcagcttcctgagtagttgggactataggcgcacatcaccacgcccagctaatgtttgtattttttgtagagacaggatctcaccatgttgcccaggctattttttctttaccatagctatattctccttattaaaaaaaaaaagaaaaaaaaaccacacaggctgggtgcagtggctcacgcctgtaatcccagcaatttgggaggctgaggcaggtagatcatgaggtcaggagatggagaccatcctggctaacacagtgaaactctgtctctactaaaaacacagaaaattagccaggcatggtggcacgtgcctatagttccagctactcgggaggctgaggcaggagaatcacttgaacccagaaggtggaggttgcagtgagccgagatctcgccactgcactccaccctggtgacagaccgagactccatttcaaaaaaaaaaaaaaaaaaaaagaaagaaagaaaagttgaaacaaaccaaccaaccttagtttgatcactatccgatatcttaatgtttaaaagttaaataatggaaaattgtcttctattcacaactacatttcaacaataagaataagctaggttcagtggcacgtgcctataattgcaactattcaggaggctgaggcaggaggatcacttgagcccaggagtgtgaggttacagtgagctttgatattccactgcactccagcctggctgacagagcaagatgcagtctcttttaggaaaaaagaaaaaaccaataagaagaggaataaatctcacagccagatacacaaaagagtacatatgctacatgattccactgaaataagccaaaaaactgacagagctaacctgtgttattcgtagtcaggaaagtacttttcttgtaatcactggaaaggaatgtaaagggaattctagggggattgataatgttcttttttaaaaatctgggtgctcattacaagagtattggtttgtgaaaattcattgagttatatacttatgatacgtacatatctctgtatacacatgttgtacttcaataaaaagtttaaaaaatactctgcctacccaagatcttctatttttctactctagttattttgtctcaaaatagaaggaaaagcatttccgtggccagatgactttggacagaaagagcatttagttttccaaaatactttgaccaggatgaaggccacagatgcatgagcagcctcacttggaatggttggtgctctggggtaacggtggcagagagagctaaacacaccttccttccttccttcacaattggctcagaggattcactttttaagtcaatattaatcacttcctaattaataattaaagatgacacttagggtctctctgtatttgttcactcagaaagtcattcactagaagctataaacgcacttcctaaatccggccatctagcaatcatatacaaatgctagagggcaaactatttaaccagagacaaatcagcagcggtgagaacaaagcctttcccttcggcaacttaagttggcacagcgatatatggcataatattgacagcaaacgcatttccagcagagaaaaggaacaaaataataaaaagtggtaaagttcccacaagtaagacactcatatctagagcaaacaccttgatatttttatcattaaagaaaaaaaaatgttttccattaccttctgataatggaatcacagaattgcagactaacagagatgggaagaacgtcagtgacttggtccaaattccaaccttatgactgctggaagacacttggactaaaaaactatgcagccataaaaaggaacaaaatcatgtcctttgtcacaatagagattaggccattatcctaagcaaattaactcaggaacagaagaccacatacctaccacatgttctcacttaacattgggtactcatggacataaagactgcaaaaatagatagtggggacttcaagagaaaggagggagggagggcaacaagtgttgaaaaacttactattagggcagggcacggtggctcacacctgtaatcccagcactttgggaggctgaggcgggtggatcacaaggtcaggagtttgagaccggcctggccaacatagtgaaaccccgtctctactaaaaatgtaaaaaattagccacgtgtggtggtatgcacctgtaatcccagctacttgggaggctgaggcaggagaatcgcataaacccgggaggcagaggttgcagtgaaccgagatcacaccattgcactccagcccaggcgatagttcgagattctatctcaaaaaaaaaaaaagaagagaaaagaaaagagtgtggtgttgatggtatagtggtgagcatagctgccttccaagcaattgacccgacttcgattcccagccaatgcagcaggctgaccttttgtcctggctaacatggtgaaaccctgtctctactaaaaatacaaaaaaaattagccaggcatggtggcgggtgcctgtagtcccagctacttgggaggctgaggcaggagaatcgcataaacccgggaggcagaggttgcagtgaaccgagatcacaccattgcactccagcccaggcgatagttcgagattctatctcaaaaaaaaaaaaaaagaagagaaaagaaaagagtgtggtgttgatggtatagtggtgagcatagctgccttccaagcaattgacccgacttcaattcccagccaacgcagcaggctgacctttcgtcctggctaacatggtgaaaccctgtctctactaaaaatacaaaaaaaattagccaggcatggtggcgggtgcctgtagtcccagctacttgggaggctgaggcaggagaatgcatgaacccgggaggcagagcttgcagtgagccgagatcgcgccactgctctccagcctgggcaacagagcaagactctgtctcaaaaaaaaaaaagaataaaaaagaaaagaaaaactaactattaagttctgtgttcactacctggatgatgggatcaattgtaccccaaacttcaggatcatgcaatatacccatgtaacaaacatgcacatgtatcccctgaacctaaaataaaaattgaaggtgtaaaaacaaactaaaaaaacaaacaaaaacaaagcaaccttcctaagaaaactctttatttatggcacatttagaggcaaccagaaagaccttctttttctttcacacactaatttgtggctcatgaaattgatgtaatcaaagaaagatgctcaaaccacaaatcccacctctcagttctcatcaacctgattccctagcttcagggtaatggtggcagagaaagctaaatgcacctttcttctctccttcacaactgcctcagctgattcactctaatttctttttgagatggagtctcactttgtcgcccaggctggagcgcagtggcaaaatctcggctcacagcaacctccgcctcgcgggttcaagcaattctcctgtctcagcctcccaagtagctgggactacaggtgcccgccaccacgcccagctaatttttgtatgtttagtagaggtggggtttcacaatattggtcaggctggtcttgaactcctgacctcaggtgatccgcctacctcagactcccaaagtgctgggattacaggcgtgaatcactgcacccggctcactctaattaagtgacaataaactacctggccaggcatggtggctcacacctgtaatcccagtgctttgggaggctgaggcgggtggatcacctgaggttaggagttcaagacaagcctggccaacatggcaaaactccatctctactaaaaatacaaaaagttagccagggtttggtgtgggcgcctgtaatcccagctactcgggaggctgaggcaggagaatcacctgaacctgggaggcagaggttgcagtgagccaagattgcggcactgtactccaacctgggcaacaggagcgagactcagtctcaaaaaaaaaaaaaaaaaaaaaaaaagactgggtgtggtggctcacacctgtaatcccagcacctttgggaggtcaaggctggaggattacttgaggtcgggagtttaagaccagcctgaccaacatggagaaaccccatctctattaaaaatgcaaaattagctgggtgtggtggggcatgcctgtaatcccagctactcggaggctgaggcaggagaattgattaaacccgggagacggaggttgcagtgagccgagatcatgccattgcactccagcctgggcaataagagtgaaacttggtctcaaaaacaaaacaaaacaaaacaaaacaaaacaaaaaaaaaaccacacacgctcacaaaaacaagccctagctctcagatgtctttttctcctcaatcctctcaccccctttaaatgatttgccaagtgtctcccacatccatggctttgttatccttcccaaagaccccatactaatgcaaaccttcagcctctgtgccaatctccagtgcctacctgctccagactctcacacccgtgatgcgcaaaactcctgaaacaagctctctgatcattaactcagaacctccaggtgaagtgaaggcttccaagccttccacattctgctctcacatgacctctgtgcaggcgggagtctgcaatggcctcaaggttcccatcccagtgctgtacattcactttctcccatttactcaatcaagcactaatctaggtactgctgtgaagggaatttgcagatgtgcgatcctaatcagctgaccttaaaatagattatccaggtgttcctgactgaattagatgagcttaggacagaactcttcttggggagagacttggagcagcatgaaaaaggttcaatttaagggagattctccaccgctggctttgaaggtgaagtggaccagctggcagggaatgaggacagtctctaggagtggagggcaacccagttgataaagaataaagaaatggggacttcagttctacaaccacagagaactgaatcctgctgcaaccacacgtgaacgtggaaaaagacactgagctccagatgagaacatggcccaaacttgattttagtcagatgctgagcggtgaacccagtcatgccatgctcagaattctgccctacagaaccgtaagctaatgaacaggtgttttcagtagctgagttacactaattcactacagagtagcagaaaacaaatgcatgtggcagggtgtggtggctcacgcgtgtaatcccagcactttgggaggttgaggtgggcagatcacctgaaatcaggagttggagaccagcctggccaacatggtgaagccccatctctactaaaaatacaaaaattagctgggcgtggtggtgggcccctgtagtcccagctactcaggaggctgaggcacgagaattgcttgaacctgggaggtggaggttgcagtgagccgagatcatgccattgcactccagcctgggtgacaagagcaagactgtctcaaaaacacaaaacaaaacttgaaggtgtagtccccaaggtccctttcaagggatcctttcctggtactttatggttaaaagccgaaagcaatttctttctctaagctcctgcactagaagccaacatgtctctattcgtacaacccttgacctcagctgacagtggacaaagagctgcggtatgtcaggctggagggactttgtgttatttttttttttttttgagatggagtcttgcactgttgcccaggctgtagtgcagtggcgtgatcttggctcactgcaacctctgcctgccaggttcaagcgattctcctgtctcagcctcccaagtagctgggattataggcacatgccaccatgcttggctaatgttttgtatttttagtagagatggggtttcaccatgttggccaggctggttttgaactcctgacctcatgatctgcccgcctcggcctcccaaagtgctgggattacaggtgtaagccaccgcgcccagccctgctggaaggaactttgtacatccaaccttcttactacaacaccgaggaaggtggttctcagagagggacccagactgggctgactcatctctagcatgtagtccagggctcttcccataatatcccactggggaaagatagaatagggaccacaggatgaatttacatttgcctaagttggccagttagcccttaaaatcctatcacgtacccagagaagagtacaataattgtgcttatgagtcaaaaccaaagagaaccaggtgactttgtaatatcatactttatgcttattgcctgggtaaaattggcttggtgagtcaaatagacttagacctctgcttccatgattcaggacctggtatcgcccctttctatccttccccacatcatctgctgataaacccttccatgtatccaccctaatctgaactctgttaccttgcttcattgcaatattagattcatccttggaaaatgggtttctttgaaacttgctgaaaggtatcatgtacagcttctatacatttaggtgttttttgtttttttttgagatagggtctcactccatcaccgaagctggagggtaatggtgagactatggctcactgcagccttgacctcctgggctcaagcgatccccacctgagtagctgggactacaggcatgtcccatcacacctggctaattttttgtattttttggtgagatggagttttgccatgttgctcaggctggtcttgaactcttgagctcaagcaatccattcacctcgaccttccaaatgctgggattacaggtgtgagccaccaagcgttggcctacacatttagtttttatgcatattccttctctggaaatttcatacctgctacatatgaaacattaaggttgagaaaagagagggacttatgtatgccgcactgactgaagtaaaaagtggaagatgtagtgaagtggatgaagtgagggaatgaagtgaaggcagactacgctttattacagaaacaccaaaagaactccttttgctctttctataaagtgcatgtgtgtctatataatttatcattatgtccatttgtgataaaatgactagctttccttgatacaggacaaacttgctgtgacaaagctggcacaaactgcatcgaaggattctgcaaaggaacctacaagccattctggcttgttcccatgaaattcacattaattatgctcctttaaatggaaaaaggcaccttaaagagatccaggctgaggctcatattatttcaaacccaaactataacagaatctagtaaataagagcatatatctgaaattatttggtagaaaagattagtcaagttcaaagtccatttctgatacagataaagcttgacttttcactctcagtcaatgctcagtaataaatgtgctaagaaaagttagtttcttctatcatagttcaagtaccaatcatttctttcaacaagatttcatttgcaaagtgaaaaaaatacacctggagctatagctatgaataagtgtaaattttcagggacaagaagcttgtttcctactttgctcttccataaaccatctagtggtaagtgctgagaaatattcactgcattctaatatgagacagatttgtgtactacttgacatgcatttgagccataagcaggagttacctggaaacaaaaaacctggtctctaatgcctgagatgccagagaaacactcaccatcagtcctatccaccatgactgtgtggcaaactgcgagcaagaagaagaactgtcgtacttctggctctttccctgactggatttgctcaataagatagtggtcataaaatgcaagcttcccatcagcatatgtattccagctaaaatcaacttgctgaaagaaatggagaaaaacaaaatatgattttataaaatatttttgacttaacaaatgacatgaacttttcttcaaaggcaaggtttcaattatgcaaaaaccaccttaggattttagcacattcttaaatgtcaagaggctcacaactgtcttaaataaaaagctccccccctttttttttttggaaacatatatgaccatatatgggtctcactctgtcacccgggctggagtgcagtggcttgatctcagttctctgcaacctccacctcctgggctcaagcaatccttctgagtagatgggcctacgggcatgcaccaccatacctggctaatttttgtatttttttgtagagatggggtttctctggtctcaaactccttgactcaattgatctgccaaacttagcctcccaaagtgctgggattacaggcatgagccaccatgcctagtcaaaaggtactttgtggtggactaaactatgttcccccaaaagatatgttgaaattctaacctctggtacctatgaatgtgaccttatttagaaacagggtctttacagatgtaatcaagataaaatgaggtcatactcaattagggtaggtcctaatccaatgattggtatccttattagaaggggaaatgtggacagagacacacagacacacgggggacaccacgtgacaacaaaggcagagacacagagttgtgtttccaagtctccaagccaaggaacaccaaggactgtgggcaaccaccaggagcagggaagaggcaacgaaagagtcttccctagaccttcaaaggaagcatggccctgctgggaccctgacatccccagcatcccaaacgattcttcggcttaaaggtcttacctctattttgttgtggttgtgttgagaggcatcccgatggtcccctgagaaacaaacaggacaaaacaaattgattctacacctatgtccagaggcccctccttacctggctttgcttatatagtgatggtggtaagaccatatacggcctggacaggctaaaatatttattatctggcactttacagaaaacgttagatgacccctggtctagatattcaaataccagtggctgtccctctccactaccttctcctaggggcctgaatcatatcctttgaaatgctttacctctcccaagtcagaaggactcacatatgtgagccacgtcctcagcccctcagtgccctaccatcttcactgatacttcttatgagaaaaggcactcacggtgcctacaagtaggaagtatatatgcatgtccctatatcattttaaacaattgtgctattaagtatatttaaaatagcactctatttgaatctagtattagccttaatattatctctaaatttacataaaattaaatttctaaatgtttcagaaaattagaactgaaatcaacttttaaaacaattggctgggtgtggtggctcacacctgtaatcccagcactttgggaggctgagatgggctgatcacctgaggtcaggagttcaagaccagcttggctagcatggtgaaactccatctctattaaaaatacaaaattagctgggaatggtggttcatacctgtagtcccagctactcgggaggctgaggcagaagaatcacttgaacccggaaggtggaggtttcagtgagccaagatcgtgccactgcactccagcctgggcgacagagtgagactctgtctcaaaaaaacaaaaacaaaaccaaaaacacaattgtaggccgggtgtggtggctcacgcctgtaaccccagcactttgggaggctgaggcagatggatcacttgaggtcaggggttcgataccagtctggtcaacatggtgaaaccccatctctacaaaaaagcaacaacaacaacaacaaaaattagccaggcatggtggtgtgtgcctgtaatcccagctacccaggaagctgagggaggagaatcatgtgaacctgggaggcggaggggttgcagtgagctgagatcgcaccactgcactccagcctggtgacagagtgagacactgtctcaaaaacaaaaacaacaaagaaaacaaacaattgtagtgaaatacacataataaaatttaccatattaaccgattttttgtttgatttttttgagtcagggtttcactctgtcacccaggctggagtgcagtggtgcaaacccagcccacaacagcctcgacgtacccaggctcaggtgatcctacctcagcctctcaagtaactggaactacaggcacacacaattttgctcactgcaacctccacctcccgggttcaagcgattctcctgcctcagcctcctgaatagctgggactagaggcatccaccaccacgcccaggtaatttttgtacttttagtagagatggggtttcatcatattggccaggctggtctcgaactcctgagcttgtgatccacccacgtaggcctcccagagtgctgggattacaggcatgagccactgtgcccggccagagatggggttttgtcatgttgcccaggctggtctcaaagtcctgggctcaagggatgtgcctgactcagcctcccaaggtgctgggattgcaggcgtgagccactgcacaccagtcaaccaatttttgttgttgctattttgagacagggtcttgctctgttagccatgctggagtgctgtggtgtgatcttggctcactgtagccttcaactcccaggcttaagggatcttcctgcctcagtctcccaagtagctggaactataggcatgcagcaccatactctgctaatttttaaaaatttttgctttgttacccaagctggtctagaattctgggcctcaagcaatcctcccaccttgacctcccaaagtgttgttattataggcatgagacactgcacccagcccattttaaccacttttaagcatacagttcagtggcatcaagtatattcacactgttgtgcagctgtttcatcttgcaaaattgaaactctgtacccattaaacagtaactcccaattcccctgactccagcccctggtaaccatcattctgctttgtctctataaatctgattattctaagtacttcatataagtagaattatacaacatttgtccttttgtgactggcttacttcacttagcataatgtccttaacccatttatgcctagtgttccattattggaacgctaagcatgtgggagttatttatatcctactgctcaaggtcatcaccaagttctgattgcaaaaattcaaaaaattgcaacctctggcataaacgagttcaggttcatctgtgttgtagcatgtgtcaaattttccttcctttcttagactgaataatatttcattgtgcgtatccacattttatttatccattcatccattgatgaacgcttgggttgcttctatcttttggctattgtgaataatgctgctatgaacataggtgtacaaatatctctttgagcccctgtttcagttcttttgagtatataacctgaagtggaattgctagatcatatagtaatgagacttctaattttttttttttttttttttttttttagacagagtcttgctctctcaccaggctggagtgcagtggtgtgatctcagctcactgcaacctctgcctcccgggttcaagcaattctcctgcctcagtctcccgagtagctgggattatagctgtgcgccaccaccacacctggttaatttttgtattattagtagagacggggttttgccatgttggcaaggctggtctcaaatccctgacctcttgggatctgcccacttcaccctcccaaagtgctgggattacaggcctgagccaccacgcctggctgtgagcccacttctggccactgtcctctcccacgcatgtgtccccagtgctgtccatggtgctcctctggtgcttagctggagaatggccctagcagcaggactctgcatcgagagggcaccagcaatgccaggagacaggctatagtccaagtaatgacctgcacacggcaggcagccccactcacccagaaaatgagtgacggcttccacttaccatatatctgcccgttgatacagcactttttaaaggtcatgatattttgtgtgagtgtccccgtcttatcagagaagatataatggatctgcccgagctgttcattgagtgtggtggttctagcttttgcgggtgtgtccttctcagcatagtacatttgcaggtcccagttgatgaagtgactctgtccaagacgaatcacttccacgctaggaagacagaagattattttccgtagagagctcggatacgagtggcaagtagtagagattttattctcattgtacagacgagagcaagctgcttatttactgctatggtctgaatgttagaatccccctccaaattcatatgttgaaacccaatccccaattcaacagtattgaggtggggcctttagaaggtcattaggtcatgagggctccacccttatgaatgggattagtgcccttattaaagtggctcaaaggagcttgcttgccccttctgccatgcgaggacatagctagaaggcaccggctgtgcctataaagcagaaagtgagcctttgccagaccctgaatctgccgatgctttgatttgagacttcccagcctccagaactctgagcaataaatttcgaaggtcttttgttatatcagcccaaactaagccctctacaaggagacaagcccatgcactcagcctctggtttctcctaaccacatgcatcattctcaggcttcagggtcaagctgattttagacaagtaatttccactcaaaattgctcagtgagatttcccactcactcctgggcacatttagccaaggcacccatgttcagaatacacagcccagcagaatggaagacacagcaacactgcagacagagcagtggacacagcaagcttgactcttcccccattccccatagcacccaggggcactggaatggccatgttcacctttgccctaagtggtagggcagagggagtgagagtaccctagggtacagactccactgtgctctcaaacagggcaaaaggcttttggcaaataccccaaatcatgatccctaaattatgataaggttatagaatatccaaaataagatattataaaaggatcatctgaattttaaaactataagggacattacctatctcagttataaggaagctgtttacatagccagcaattgttaggtgggccaaggaagtccttaacaagttaaacagatggaaaaatgatgctctccccacttctctcccttccgtaagtatttcctaagtgcctactatgtaccagataccattctaggtgcaggggacatgtctgtaaacaaaacaaagtcctttctcttaaggaggttactttctagtagagacagacaaataaattaataaagagaggctctatcagaggtgaaagttctctgcagaaaatcaaagcagggggccaggtgtggtggctcacgcctgtaattccaacactttgggaggccgaggtgggcggatcatgaggtcaggagttcaagaccagcctgaccaacatggtgaaaccccgtctctactaaaaatacaaaaattagccaggcatagtggcatgtacttgtaattccagccactaaggaggctgaggcaggggactcacttgaacccagcaggtggaggttgcagtgagctgagatcgcgcgactgcactccagcctgggaaacagagcaagactctgtctcaaaacaaaacaaacaaacaacaaacaaacaaacaaaaatcaaagcaaagcaaggtaaggagatatgaagatctccaggaaggagaagtggtcagaaacagaatgagtcaggaaaggtcagggtaataaggtgttgtctgagtaaaggcctttgtagtgaaaggggagcagatagatacctatgtaaggaatgcccctggcagagaaaagagcagggacaaaggccctgtgcaggaagaatatcaaggggccagagtggcagaagcccagggaggtgggctgaggtgcagaaggtacgggcggagtggaaggctgagcaccagatcacacttggggccctggggttgggtttattctgaatgaggtttgaagtcaaagcagagatactatctggaagaacttgctccagcatgttttcaaaggacctttatctccaagaaaaaagaaatcgtatttgtcacatgacatacctttatataaaattatgtatacagtttcttttataatacacattgatggttttaggcaaaattatctatgtaatagttcccttgacaaaggtaacactcaactcggtttttctcaaagtagctgtggaacagatggctgccccagggctttccttcatgttaaaagaacaacagtaactacatgtaatcaaattaaaaataaagcaaatgcacatataatgacactaaaataaaataaatgcctctaattataggtgtgtatgtgattcctatgtctctgggctattctttatcagaactaagaatgaactctggctgctgggtttattccaaagcactatccctcccaaaaaggtctcaaagtcagtttggccaagggcagtgaactttcatattaaaaagagaaaaaggccgggtgtggtggctcatgcctgtaatcccagcactttgggaggtgaggtgggcagatcacctgaggtcaggagttgaagaccagcctggccaacttggtgaaacctgtctctactaaaaatacaaaaaagtagccagacatggtgatgggcacccgtgatcccagctactcaggaggctgaggcaggagaactgcttggatccaggaggcagaggttgcagtgagcctagatcatgccattgcattcctgcctgggcaacaagagtgaaactccatctcaaaaaaaaaaaaaaaaaaagtaaaagtaaaaaatgaagaagtatcaccaaatcagctgcttaccacttatcggagatatgcccctgactttgttgttgtggttgagatttgagatgaaaaagagaacattttgagaggttgatgaaggacagggagtttctttcctactaggaggtagtggccggaaagcacaagttctccaccttgggtgtggcagatgataataaaggctcagataagaggtgaggaccacttccaaaagggaaaactaagtttttccatcacctgctaaatcttcccctcctcccagtccctttctgaagtctgggctttggaacccggtgagaagggaaccttactaataagacaatgactacaggagtagcaatcgatctttgaaattccctacccttatctgcaaacaggatgagataaaaggtgcctggcacagagtggatactcaaatgttaatttccttttcctctcttaccctcaattctgaaatgaacgtgattttcttacctgttctttgtgacctttgaaacagtgatcactagaaatgaaggcactatgttgggagaaggtacaacattcttccattaaagcaaaatgccagagaggacagccttacctgacatagagagagatgggtaccatggtgttgagaacaatgatatagccccagaaaatgaggaatccacggtaggagggtgtatcgtcttctccatcatagaggtaccaagaggaattgcccacctgtgcttcccaataagcatggccgatggcaagaccagcagaaagcagaataagaacaacaaagatctagaagacagaaaacatttaaatgcattctgaagatggatttccaacctcttgcatttcctagatgctaattaaccttactcaatacttcatatgattgagaatttagtagtctgaaaaataatatatgtcaaataaaaacagcactatcataacgctttgaaagtctatttgattgctgcaattgactgatgtatcctacatctcccatagaaggtaaggttttgttcccaaaattatctctccaaagagaaggtggtgtcttatattcaaatccttgaagaatcttatattacagggcattctctcaattacgtttactttgaacaataacatactgtttggggaagatatcttacttagcatgaaacaacttccaacaaggctgaactggaaaactggaatgcttatagaagatattcaacagatttttttttttttttttttttttttttttagacagcgtctcactgtatcacccaggctggagtgcagtggtgccattgtggctcactacaacctccacctccctggttcaaacaattcttatgcttcagcctcctgagtagctgggattacaggcacgcgccaccaaggccggctaatttttgtctttttagtagagacgagtttcaccatgttggccaggctggtctcgaactcttgtcctcaagtgatctgcatgcctcagtctcccaaactgctgggattacaggtggccctcacccagccagaatttttttttcagggcaagaaaatttcacctatatttgggcgattattccttaaggtgtaatgtcataagtattgcatgacattgtaaaataagatcacttaagaagcaatatgataagtattatgttgtagaagttatgagcatatatttatggaaggaataaaaagtcaaccatcctagtggtacttggagattcgcaagtgggaataaaatttccagagacaaatttaaatttctggacatggagtccaaaagtgctatatctcacaactttgtcgtggaaagagcagagtgccaaacaggctctttgagagtggataaccacaaccatgacaccaaagatgaatgtgaaaagttcaaatacaattttcatgaaatgagaaagcaggggaaaatgtttcttaaattattatttttatgtgattttaaacatgtatatgcaatcaaagaataagttttagaagtatgcattcaaattgaattaaatacttgaaaaaatttttcattgggaaatagaaggagtgcttaatatttggggtcaccacgtgggcagaaaagagcaaacatagcaggtctgagactgcttcctccgaaggccggcttgcaaggttcgccctgggctggtatctggtaacttagatgtttggaggatttcccagttattttttattctctgataagaatagctcatgggccgggtgcagtggctcatgcttgtaatccaagcactttgggaggccgaggcaggcagatcacttgaggtcaggggttcgagaccagcctggccaacatggtgaaaccccgtctctactaaaaatacaaaaattagccaggtgtggtggcaggtgcctgtaatcccagctacttgggaggctgaggcaggagaatcacttgaacctgggagacggagattgcagtgagccaagatcatgccattgtactccagcctgggcaacaagagtgaaactcaatctcaaaaaaaaacaaataataataataataaaaaaactcatgatgcctaactgtgcaaacagcatggtttatgctgaccatctgcattcttttggggagtctagagtttttttgttaaaaacctttgacactgagtctctcatgagcttccctggtatagacaacatttcacatgtggtgtcattaattgctgctgggagaattaagtgcctattgtgtgtgtggtttggtggggagtgggggcaggacggccgacttttggaagcttgtgcctggtttcctttgcactttgctccatgagtctttggtgatcttgctctgtgtccttttgttgtaatgactcacagctgtgaatacgactatgtgctgaggcctatgagtccttccagtgaatcatcaaacctgggagtggtcttgagtgtcctcgacatactttatttttagccttgccttgtatttggagctatacagtatatgttgggggtgctgggggaggcttgcttctaagagaactgcctctatgggaaagtaacagcaatgaaatcaaccctacattgacttcaggagtccagcttcactaatttatctagggcttcctggttttccagttcccgtcatcaaagcactcagggcaccctacaaccgaaatttcccttcccaagggaattctcctgttaaaagtgtggcatttctgagaaaaagtaaggcatttctggaaaaaaaaatcccttcttcctgcatttgaagcttggagtgcccaataatttttctattccacctaaagaggtaagattttgtattagaaaaacatacgataatattagtgcaaaagacagcaatctagatgagagatctactgagatgaaaaataaataccgtgtaaaccatgtagttcatcaagtaatcaattttagttcttttaaatctggttttcccactattcttcattattttagtgtcagcacctgaaaatggaaaattcaatgtagtcatcagttgggaaaaatcaattcactagctcaccaataaaattactcttcttggccaggcatggtggcttacgcctgtaatcccagcagttttggaggctgagttgggcggatcacctgaggtcaggggttcgaggccagcctggccaacatggcaaaaccctgtctctactaaaaatacaaaaattatctgggcatggtggcacatgcctataatcccaactactctggagcctgagacaggagaatcacttgaacccaggagacagaggttgcagtgagctgagattatgccactgcactccagcctgggctacagagtgagactctgtctcaaaaaaaaaaaaaaaaaaaaaaaaaagctcatgatgctattactcttcttttggttttgatggacaaaggacagaaaagcaatcccctctaagtctttaaagatcatagctgattaatttcccaagaaactctgaacgtacctgcaaaaatgactaagccgtggcagaaatcggtgttcctaattacacagccacgtaacaaaattttatcagcatccaaaggaaaacttgtgtttctccaaaatagtgttcctgtaaacttatctagtctgttattgggttcttcacattcaataaaaccttttaaaaatataagattcacataattaatcacatacaaaagtctttctggttttaatcaataggaattgaaccaagcaactaaaatttaaagcaaagtaagacatgtttggtacaaaccatcaaatgtagccaatgtatcttctctttggaggtactggtctgtgatttcaagtgacatcttaaattttaaattggtttctctaaaggaatggggaaaaaatgaattaaatgaacaaatttttgagttcaaagtggaagttaatcatccaaagttacattagccatacctggacatgaagcctaaataattagctgtttctattttcaaactctgttcaccttggaacttcaggtttggaaaaggttatcccctgaagtcgagaaaatttctgaccttgggaaatgttggttcccttcactgtttgttgttgtgaaggttaggacagaggtacccacaaacatccttctcattaactttaactttaccatcagctaggactaccaaagtgctgtttgaaaatgtagtgtctaatatttaatcacattaaaatgattctataacacatatttgttacagaaattctgtttcgcctctgtcaaattcttttccagagtgaataactggatcacatgtttttgaaagacaattttatttggaaaaggaagtcttagctttactcccaactgccccaccatagtgcaaggtaaggtcgtgggtgggcacaagggcaggccggggcaggtgctctcaagggtgaggctgccgtctcacgactgaaggctttatataggattcacgaatactcaggaattttccctagggaagttcattctcaacctcaccattctgttctggcagggcatgttaggatcttatgtctttgtaaagctttagaatctctcatggaaataatagcagttttatagttgagaataaacagtcgggcgccgcggctcacgcatgtaatggcagcactttgggaggcagaggcaggcagatcacttgaggtcaggagtttgagaccaacctgacaacagaaagctctatcaggcaactgcccataatccaatttgggtatagcctcggggccttaaagagaatgcagtgtctttgtcagttaagcctttacaattaagaagtggttaattggtttttaaccaattagcctgtacaattaagaagtggttaattggctttaagtatttttttccgccaaaaaaaaaaaaaaagtgtgatagatttccaacagtcaattgcctgatctatgaagcaatgacagccctagttttcagtctcatgatttccgctctctgtaaagcagtgtatgcacatctggagcgtgaggcgcgaggagcagagggagcaatgtcccgactctaccacttactgtgtgaccttgggcgggctgctgcacctccctgggcctccgattcctcatgggtaatacagacgaataatattcgtctcacatggtcgtttagaggattaaatgagctaatatgtaaagtgccggcaacctcgtgagcactcaataaatgccttgaaaactggtcagaaaactggtcaaaaacagaacttcattctcttttaaatgatagcatagtaaccaaaaccaacacaaggagaattcaaaattgcctcctggggccagctgctgtggctcacccctgtaatcccagcaatttggcaggccaaggtgggcagatcacttgagatcaggagttcgagaccagcctggctaacatggtgaaaccccatctctactaaaaatgcaaaaattagctgggtgtgggggctggagcctgtaatctcagttactcaagaggctgaggcaggagaattgtttgaacccagggggtgtggaggttgcagtgagctgagatagcaccactacactccagcctgggcgacagagtgagactctgtctcaaaaataaataaataaattgcctattggtaaagactttaaaaatctgttcctttctctgacacagataataacctcgatattattcatatctgtctggacgctgctcagcagttgataaagggctcagacacatatgctcctgtctgatccttttaccttccctgagaggtggagaaacgcaggtagtaagagctccacttcacagaggcgcaaaggtgagatcagtagggacagcagcaggtggcagaggcaaggccagatatcaagccgtctggtccacaatgccccgatttcagtggaatgaatgtgccttcaaaggccagctttaaatcaggcccatcgagacacacttacccatccagttctgctgtttccacatagcagaggctgttaggctcagagctagacagcaggagaatgtcagcctgtccaaaacaaaacacacaaataacaccgagaccctgagggaaaagccgagcacaggggctgggggagaacaaggaacaagagaagcagaatttgttcacttactggaacaaaatcattttttttcagacgaatgacgtctccaacttgaatttctttccacttagcaactttgaacctaaggattaaaaataatgaggatttattgacattttaagttacaggcaagggaattactattctttctggatgttatagattctggaaaatatgcaagtcacagagaaaatgctaaaattttgctctttaatggatgtaaacatattaaaggggggcatgaaaattgtattgacctctgaaggaagcaatgatgaatgactttgatacattcttttcatctaggtcatgtaaggaagagtttatgggggccacttatgtgcgtggcagggaaatacttgccacccccttttgtttttgcttatgtccaacttgcctccctgctgtgttccttctcagtgacccatcacttgctccatgctggtcccaggacagaagcacctacattatggcacccacctgggcctcccagagtcttcgtggggcttcagagcttgcctactctctgctgtttaaattatctttattatttatttattaattttttttttcattgagacagagtcttgctctgttgcccaggctggagtgcagtggcacgatctcagctcactgcaacttctgcctcctggggttcaagagatcctcctgcctcagcctcccgagtagctgggactacaggcacgtgccttcacgcctgactaattttttagagatgagtttttaccatattggccaggctggtctcgaactcctgacctcaggtgatccacccacctcggcctcccaaagtgctgggattataggcatgagccacctcacctggccggttaacttcttaattgtaaaggcttaactgacaaagacactgtattccctttaaggccctgaggctacactcaaattggattatggtcagttgtctgatggagctttgtgttgtcaccacaacttgtgtttacacagccccttcagcctccctagggcatcattttcagggctttgctcacgtcttgacatctttccccacattccctcgctaaagtgaattttcccttccctgtactgtcagagcattttgtttttatcttttttattctgatatggattttattagaatgatgtgtgtaggtgtctcatcttctgtcttgaactataaatttctcaaggatactgtcctgcctccaacatgcagaaagtactccataagtgtttgttaaattaacgtagtcaactgtgacgaaagcaccaactcagggatcagtaatgagttgttttttgagcaggaggcttcaggcagaactgcaaattcaagtgctaaaaatagtaactaaggcctcattccaagactttttatgtgtcaacactgaggaaagtaacctgacttacagccgtacttccactctaatgcaaatatagactataccaagctataaatatgtttagatggctttttttcctttgcaaataagaaaattatgttccaaagttacctttcaagtgtcaaaagacaaaatcacaacaatttaaagatcttaattggctttatttacaattctaggattaggaaacacttcattcagtaaaatagaataagtgtcccaatgagcctagcagaggaggttgttgttgttaagacaggagtctcggccgggcccggtggctcacgcctgtaatcccagcactttgggaggccgaggtgagtggatcatgaggtcaggagattaagaccacggtgaaaccccatctctactaaaaatacaaaaaattagccaggtgcagtggcgggcgcctgtagtcccagctactcgggaagctgaggcaggatgctgtgaacccgggaggcggagcttgcagtgagcggagatcgcgccactgcactccagcctgggcgacagagcgagactccgtctcaaaaaaataaaaaaaaagacaggagtctcactaagttttccaggctggcctcgaactcctggcctcaagtgatcctcctgcctcggcctcccaaagtgctgagattacaggcgtgagccaccgtgcctggccaacccatatgtttagcctgtaccatacctacctacactggtaaagaggagctctgggttgccttgaatttggaagtctagggtgcatgtctggcagggccatggcctgagcagcccctgcagtggggtcacacctataggaacttgagcattagcagggtagagcacagggggcctcctcagaggaaactggaacatcggatagaagaatctaacagaattgcctccaatatttcagtattcagaattgccttccagtagccctgctaagaaggtgctggcctatccatttgtcatttcggacttacatgcaaatttctattttaaaatttcagaaatactgaaatgtaaaacatctacaatttcgtcaattgaaagataagccaaattttttttttaatgctggagttaagaattgtatactaaattcattaggggaactggggcataaacatatatttaaaaagtattttaaatctccaagtcatttttggccataaatgaatggcagataaacacatagtgattagacgactgcctccagtgaaattaagtttattatttatagcaggttcattacgtccactgggtatatcatttgtatatgtgaaaatctttaaaacaatattatagtttaaaacttttaaaagtgttgatatgttaaaaattttaatgaatatttcctatggaatttagtactcaaaatagtcatctttttatctatttttatcactatccttattagatttattacaacaggggtacatactcattaaaaagataatttaaggccaggcatggtggcttacacctgtaatcccaacactttgggagatcaaggaggataacttgaggtcaggagtttgagaccagcctggccaacatggtgaaaccccatctctactaaaagtacaaaattagctgagcatggtggtgcacgcctgtaatcccatctactcggaggctgaggcaggaaaattgcttgaacctgggaggtggaagttgcagtgagccgagataacgctactgcactccagcctgggcgacagagcgagactctatctcgaaaaaaataaacagttaatgtactaatagccttctacattgtaataattatctctgaatgtgtttctaggcagagttatgcattacatccttgaaactcagttactaattagacacagtacctgccatccttaatgacttcacacgtcctattgttgatttccttatccattttatggcgagccttgagaaggaagatggggaaatgctgttttaaacatctcaatagagaaggaaggcacgagaacttaaagtcaactcaaagcaatgagtagaacgttgtatgagaaatcctcaccacatcgtccaccaggtctttgattgcagtgacgcccagcaccacaagcaggggcactagtgtggtgtaccaagccagggtagagatttgaggaactgcctaaaagaataaaagggcttatgtgtgtgtccatgaaggcatatcaagcttacaggtaacttattgctaattctaagcttgctaattccaagtctcatcaccgtcatcacataagtctacatcctgcagagtatataggaaaggctcttcaagcatttggacaacctccttctagtggttctctctagcttctggatacctggaacagagcctagagggcagtggctcctgaaattatctcattgcaaacttaactggacaccaaggaagttttgtattatgatacctaaaaaagagttgctctaaatcttttgtgaaaatcatatttaactgggggtgagggggtaggagtggcaagggagaagtctcgtcttaactttttttttctttttttttttttgagacagagtctccctctgtcacccaggctggagtgcagtggcacaattttggctcaatgcaacctccgcctcccaggctcaagcgattctcctgcttcagcctcctgagtagctgggattacaggtgtgtgccaccacccccggctaatttttttgtatttttagtagagatgggttttcaccatgttggccaggctggtctcgaactcctgacctcaggcaatcctcctgcctcagcctcccaaagtgccgggattacaggtgtgagccaccgtgcctggccaaagtcatcttaacttttaaggaatgcatgcatagtaggttctatactgcaggtttctcagtcagtggtttctgaggatcccatgctgaaggcaatgatggcaagaggtactagctgcctctgaaagtgagggattagggagagcatctctgagggcattagaagaaagtgcttccttcatgatcatcactattggcctatccaagaaagtgagctggccttcctccatcaagacagcctctaagtttgaacaaagattgggatgcaagtttaataaagttatttcataaccatcctcctgatcactgggctgtataatgtagtggttaaaatgacaggctttggagtcaactcctagatccaagtcttggtcagctctatcatttatggcttatgggactttgagcaagttactttagcttactaggcctcagcttttctctgcaaaatggaggtcatgccaggcctgaccttctagactagaagaattaagtgtagtgacaacacaagttaagaagctgcctacggctattactgttaccctaatttggattgctgaccttaagagaagataactgcgccaggcacggtagctcatgcttgtaatcccaacactttgggaggccgaggtgggcggatcacctgaggttggaagttcgagaccagcctgaccaacatagagaaacgccgtctctactaaaaatacaaaattagccaggtgtggtggcgcatgcctgtaatcccagctactcaggaggctgaggcaggagaatagcttgaacctgggaggcagaggttttggtgagctgagatcacgccattgcactccagccttgataacaggagcgaaactccatctcaaaaaaaaaaaaaaaagagagagagaagataactggggtgcagttagaagacaaaaagatccttcttcccacatcacagtgaatatgtgaaactcctcttccctgctagaaggaagtaagggaaaatggtctacttcctacagagcagcaccttggagtttgcagtgctaacctctacacacacctttctaagcatctcctttgataacagggccatcctttactatctgacttgaaggtcttacagtttcctaaatcattgcctatccatttctccttaccatcgtctcttctttttctctcctctccacgcatcctccatccccacctagacacacattctaccccattttcataaaaccttaaagggtcaatcccagcaggtataacttttccaaatccaatgcttgccgtaaagaatctgataaagtgccgggcgcagtggctcatgcttgtaatcccagcacttggggaggctgaggcgggtggatcacctgaattcaggagtttgagaccagcctggtcaacatggtgaaaccctgtctctactaaaaatacaaaaattagctgggcgtggtggctggcaactgtgatcccagctactcagggggctgaggcaggagaatcgcttgaacccaagagaaggaggaggaggttgcagtgagccaagatggtgccactgcactccagcctggacgacaagagcgaaacacggtctcaaaaaaaaaaaaaaaaagaatctgaaaaaaccaggtggatattctgagcttaagctatgtaatccgcacggcagacactaaaggttgattctggcgctaactagtgtgtgtagagttccctcggttacagcaacagttcttgcacagctaaactcatgctctctggataactggatgctttgccacaattaggaaaaaaaatttttaagtaggccttttaaaatgtaaaaacagttcacaaaaataacttactgaaatttatgaccaaaattttaataaaaaatcaatgatctttttgggggggaaattcagcatctaactacaatgataaaagacaagcacaaaatagctttaattttaaggtgcaaataattttacaaagtaaggattttattttatttttttttaagatggagtttagctcttgttgtccaagctggagtgcaatggtgtgatctcggctcactgcaacctccgcctcctgggttcaagcgattctcttgcctcagtctcccgagtagctgggattataggcatgcaccatcacgcctggctaattttttgtatttttagtagaaacggggtttaaccatgttagccagggtggtctggaactcctcacccgaggtgatccacccgcctcggcctcccaaagtgctgggattataggcgtgggccactgagcctggctggattttagttttattcacttcagggataccaattttaacacccatatcagtataacatgaaattttttaaaatacagaattagaataatatttccatttgctccctttccctgttcatataacactgattgagctggttctgtgtatgaggcactgttcctttatgtacagaaccctgatgctaatataaaacactttcaagattattcacattatatgtgtctacagcttaaatgttatcgagtcactataattcaaacagatttaagatagcaaagggcattacctgtaagataagaagagccaggaaatataaattggctgctctcttaaactgctcaaacagattcattggtataaaggtaaatgcgttgtacttgtatgttttaattgcattattctgttggaaaaaataagagtcattctaaatgatgctgtatttatcacaatgtatacacatctgcaaaagtcacaagtcccacagcttacagtgacaaaggaacatcatctgtcagaaagatattgaggattttgtctgggtgcggtggcttatgcctgcaatcccagcgctttgggagaccgaggtgggtggatcacctgagcctaggagtttgagaccagcctagccaacatggtgaaaccccacctctactaaaaatacaaaaattagccaggcgtggtggcctgcacctgtaatcccagatacttgggaggctgaggcaggagaatcgcttgaaccagggaggcagaagttgcagatcgccccactgcactccagcctgagtgacagagtgagactctgccttaaaaaagaaaagaagaaagaaagatactgatatttcttttaagcttttaattctagccaagcagccaagcctcaaaatgactacttggagtcttatgacagaggcagtaacaagaaacagacatcagactgtgaccaaataaatcctgctgtcagattccttgacccattagagactgttagaaaacagggtaaaggtagacaacaacatggccaaagccaggaaaagtgaggcttttatttaagtgaggagacagagcctactatgtaagaaagagcaaaaggtactgtagtgggttgcattgtgtcctgcaaaagatatgttcaggtcttaacactaatatctatgaatgggatcttatttggaaataggatcttcgcagagataatcaagatgaagtcatacgtgattaggacaggctctaatttaatgaggtgcttattcggactggggtccctataagaggaaagttgcacacagacacacacaggaagagtgccccttgaagatggaagcagagattggggtgacttcatctgtaagccaaggaactccaaggattgccagtggccaccagaagccaggggagaggcagggaacagattctcctgcagaggctccagaaggagccaaccctgccaacaccaagatttcagacttctgatccctgcatcaggagagagtaaacttctgttgttttaagccatccagttgtggtactctgctatggaagcccttggcattaaaacacacatcttacaacatttaagcccacacttaatatttattattattattattattgagacagagtctcactcctgtcacccaagctggagtgcaatggcacaatttcagctcactgaaacctctgcctcctgggctcaagcgattctcttggctcagcctcccaagtagctgagactgtgggcacatgccaccactccaggctaatttttgtatttcgcatttaatctttaagcattctttatcacattccaaaggtaataagcatttttgagtcaaaaatatgtttaaaatctctaaatccattccaggcagagaaggggaagataagttcttaagagattcctttcaaactcattactttcaaacaggaggcttctgtgccatcattgtatattctttcataaaacatttctaagagagcttaaaatttaaaaaagagagagaaaatttcaatctacataattctgttttgtttcaagtcacccgctacccaccccaaaggtaaacatcaataaaaatgacattctatagaaacaatgatgattatcagtagccccaggcaggtggttacgtggaaggcaggtgtagcatgaaggtagtaagcatgccagctactggaaaaaactgcattttaatgaaaacaattcagaaagttaacaactcaccgcatatttactctccttaatacacaagaattttgtgttcataaagtgaggttgttcgtggtacttgcgatcgtttgctttgacttgccatgtacattctttaaaaaaaagggagaaaagttcgtaagtagcaaattaacatgttgttatgagttgaattgtgtcttccccagattcaaatgttgaagtcctaaacctccatccctcagaatgtgaccttatttggaaactgctcattgcagatgtaatcaaattaaagtgaagtcattagagaggaccctaattcaacatgactgatacctttacaaaaagggaaatttggacacagagatagatggaagacgatgcgaagtcacagggagaaaatggccatctgcaagccaaggagagaagcctagaacagatctctcccttgtagctctcagaaggaatcgatcctgctgacatcttgatgcctcgaggaaggcataagcatgctgctgctatgaaagctggaggcaagcatgctataaatcaggaagaaaatgaggaagcaggccgggcgcggtggctcacgcctgtaatcccagcactttgggaggccaaggcgggtgaatcacgaggtcaggagttcaagaccagcctggccaaggtggtgaaaccccgtctctactaaaaatagccaggtgcagtggcgggcacctgtaatcccagcttctcaggaggctgaggcaggaaaattgtttgaacccgggaggtggaggttgcagtgagctgagattgcgccactgcactctagcctgggcgacagagcaagactccatctcaaaaaaacaaacagaaaagaaaagaaaagagaatgaggaagcacctctttggcaccaagttctccatgaacatgcatgctggatgaagctcccttgagtgacgcacataatggagagaactaggtgttgatgaatccccaccaaattggcagagaagagaaattaacaatgagtgtggcacaactatttttggagatgggaatatattaaaagacacttgaaagtaaaaaattacaaaaatatcagtcttaacaactataataataaagattgtgtgatctcggctcactgcaacctctgcctcccgggttcaagtgattcttctgcctcagcctcctgagtagctgggattacaggtgcctgccaccacacccggctaatttttgtatttttagtagagacggggtttcaccatattggccagtctggtcttgaacttctgacctggtgatccaccagccttggcctcccaaagtcctgggattacaggcgtgagccactgtgcctggcaaaatgatgtattttctagactcctactccaaaggaaatatagacaatatggcaagagtaacaagtgtaggccgagcatggtggctcatgcctgtaatcctagcactttgggaggccgaggtggatggatcacttgaggtcaggagttcaaaaccagcctggccaacatggtgaaaccccgtctctactaaaaacacaaaaaagtaatggggcatggtggtgcatgcctgtaatcccagctactcaggaggctgaggcaggagaatctcttgaacctgggaggcagaggttgcagtgagccgagatagtgccactgcactccagcctgggcgacagacggaaactctgtctcaaaaaaaaaaaaaaaaaaaaaaagtaacaagtgtagactattgaggaatgcaaataattaacctgattgcttttttaaagccacaatatcactattgaacatttttctcgcatcattttggctgcctttcatcgggtaatcataacagttgtgttattacaaatgaaaatgttcctggtatctttgtagctcaagtgcaatcttatcaaaagggaaaataaaaatggaaatataaagccactcataagcactgtaatcacataggcaatcagaacagctcattccactcaaaaaggcgttctcaaagtaggtagataagaccttacataaggtactcttgaatccattctatttggtggtaatttgcaaatgcatgtgcttttaatggtttactttagcacacagatgacttgtgacacatccccaccaccagggttctagaacactgttcagaaccactgttacgcatttcaggaaggctgagaagaaaaacagacaagatttctcaagaagacagaaaaggccaataagggatttttaaaaagtcaattttagaaataactcaagtggaaagaagaaactgccctgttaaggagctggacataatgatctttcccagtccacttctggtccatcccccttgtggctctataaatttgcttcataattaagccaccagctggtggtggctctgtctggtcccagcactataccctcatccctggccaattttgatttggatgattcagacagagagggtggcatcagacctcgagtaggtgcagtgaggggttaccagaaatgaccttgatctcttaattttacacttctgccaatactgtggggagcctggagaaagtaaccagtatgtctttgtctgcaattgaaccgcaaacacgtttttactcaattttagaaatctgactgcagtcaagtaatcaataaccctatttccagttaaagatccttgtttggcctaattcagacaaatcaggggacaaacaaattgatgtctactctttattcatctatgagtttaggctaattgcttgagctgtatttcaatgagataccatgaaaatatgaaaacagagctccatggacagacacacttgcagaagacagcaccttgcaaccctctcttggaagttcggtggatttgcttgtacattaaaggctgtgagaagtcctgtagtaaataaactgattttattttataagttaaatgtttaaaatgctttaatatttaaaatagcttttccaaaattaatataatcataggcactttttaaaaaatcacagaacacttattaacatcagttaagaagtgctgcactgatacacatgcctttaggaagggcagcaaaacagcacgtggaggaattgacctttttgagcaaatatttattttaagtgtctgcttggaacagagaactttactggacacttgaactacaaagataatttacagaaagagtaagcatcttgccccattttctttttttgtccttttttctttcttttttcattttttttttgtttgagacagtcttgttctgtcatccagggtggagtgcagtggtgcgatctcagctcactgcagcctctgcctcccaggttcaagcagttctcctatctcagcctcccgagtagctgggactacaggtgcacaccaccacgcccggctaatttttgtatttttagtagagacagggtttcaccatattgatcaggctgttctcaaactcctaacctcaggtggtccacctgcctcgacctcccaaagtgctgggattacaggcttgagtcaccatgcctggccactttttcttttcttttctttttttttttttttaagagacggagtctcactatgttgcccagtgcctaggctggcctcaaattcctgggctcaagtgatcctcctgcctcagccttcagagtagctgggattacaggcatgcaccacactgtgcctggctcatctcattttctagaatggatatattgacaaagaaaagagaagaaataagaaatgcaaaaaatgcaccttcaccatatggccctttagctaaaagctacaaagctaacaagggtgtgccatcagaactatccatgtacatgtacagagatgattttaacagctgccatgtgacatgtggcttaaagtcaccctgagtctactaaatggttgtgttgtcaatatatctaaatatggctacgtgctctccagagtgttcccatgatcaccacgtcctttgatcagtgccatctggaagagcagatgagtgcagccctcctctcatcctctctgtgctggctccgaacgcttgcttacagacccaccaacaaccaagaagctgcactggttggtacacactgcagcaaacaaggaaaacaagtagataaaaagtccaacatcaaaaagaaaaaaaaaccatagaaacaattgaagagagaatggctaaaggacatgaaaagacagttcatacaaagggaaattcaatgctgttctcgctgaggctggagtccaatgatgcgatctcagctcactgcaacttccgtctcctgggttcaagagattctcctgcctcactctcctgagtagctggggttacaggcgcccaccatcatgcccggctaatttttgtatttttagtagagaccgggtttcatcatgttggccagactggtcttgaactcctgacctcaggtgatctgcccacctcggcctcccaaagtgccgggataatgggcatgagccactgtacctggcctcaaatggctcttaaacctgtgagaagatatttgggttcctaaaagagaaatgcaattcttcactgagatagtagtttttatcctataatagcaaaacattggcacatggtaatgcttgggatgacattctaggttcaaaagagagcagagaaacagacactctgaggtagcctttatggagagtaatttggccagatctcaaaatttaacacacacatgcactgaccaaataatcacacttctaggaaatatcccccatgtacctactgcagggattttcaatgcagccctatttatcagaacgactagaaacaacccaaatgcctactgggaacagccagttaaacacgattacaatgatagcctatgcagtcagcaaaaaaagaatgaggtgaccccataaatatggtaggaattacctccaaattacactgttaagagacaaaagcagaagggtatctaccatcttgtgctttcagctgtgtgatgcatagaattcatacacaatatgaatgcatatatgtacacacacgtgcacatctgtttctgcatatgtgtatgggtatatgaggaagcaagtttgcaagcattctttgcgcatacaaacgtgtatctctctggaaggacatattttgagaaactggtaaccgtaatttctttttgtcatttttttaaaagacaaagtctcactgtggcacctgggctggagtgcagtggcatgctcatagctcactgcagcctctgaactcctgggctcaagtgatcctcccacctcaacttctggagtagctgagactaaagtgcacgccatcgtacctaatttttaaatttttttgtaaagatgaggtcttgctttgcagaccaggctggtcttgaactgctgcccacaagctatcctcctgccttggcctcccagagtgccgggattacaggtgtgagccaccgtgcccagaccagcagtattttttttggaaaggaaactgcatgactgagggacaggagaggcaggaaggaaaacttcattttcattctggacccttttctaattggatcatttacatgtattactgttttaaagcaatgtttgtgattcctctccttccctctattggcatatatatatatatatatatggcgaatatggagaggagcaaggtggccaaatagaagctcgcacgaattgtaattcccataggaacatcaaatttaacaactatctacaaacaaaaaagcacctttataaaaaccaaaaaatcaggcactcacagtacctggttttaactttatattgctgaaaaaggactgaagagggtaggaaaaatagtcttgaattgccaatgccacccctcccccagccccagcaccagatgtgtggcatggagagaaaatctgtacgcttgggagagggacagtgcagcgattgtgaggctttgcactgaactcagtgctgccctgttacagacagtagaaagcaaaagcaggctgaactcagctgatgccagaccatagagggagcatttagaccagccctagccagaggggaatctcctgtaccttggtcagaacttgaattctggcaaacctcgtcaccgagggccaaagtgccctggggctctaaataaaattgaaaggcagtgtaggccccatgaactacaactcttaggcaagtcctagtgctgagctggacttggagccagttgacttagcaggcacatgacctactgagacaccagccagagcagctagtggaatgcttgctcggcccctccccgccaacctcactgctccaaaagagacctcttccttctgcttgaggagatgagagggaggagtaaagagaactttgtcttgcatcttggataccagctcagccacagtaggatagggcaccaggcagggtcatgaggctgtttcaggccctagttcccagacaacatttctagacaatcctggatcagaagggagcctgctgccttgcagggcaaggacccagctctggcaggatccatcacctgctgatgaaagagcccttgagccctgaataaacagtagtgatacccagttaatatccaaggctgtgggccttaattgaggctaagatattctggctttagttgtgacccagcacattcccagctgtggtggccatggtgagagattccttccgcttgagaaaagcagaaggaaaattaaagggtgctttgtcttgctcttgatctttctctttctttctttctttctttctttctttctttctttctttccttccttccttccttccttccttccttccttccttccttccttctttctttctttctttctttctctttctttctttcttttttctttctctctctctctctttctttcttttcagagatagagtcttgctattttgcccaggctggagtgcaatggtgtcatctcagctcactgcaacctgtgcctcctgggttcaagcaattctcatgcctcagcctcctgagtagctgggattacaggcatgtaccaccatgcccagctaatttttaaaaattttttattttattttattttattttattttatttgagatggtttctcactctgtcacccaggatggagtgcagtggtgcgatctcagctcactgcaacctccacctaccgggttcaagcaattctcctgcctcagcctcccgagtagctgggattagaggtgtgtgccaccatgcttggctaattttgtatttttagtagagatggggttgcaccatgttggtcaggccagtcttgaactcctgacctcaagtgttccacccaccttgacctcccaacatgctgggattacaggagtgagccaccgcgcccggcctaattttttttatttttagtagagacagggtttcgccatgttggccaggctggtctctaactcctggcctcaagtgatctgcccgcctcagcctcccaaagtgctgggattacaggcatgagacactgcgcccagcctgccttgcacttgctaccaccttggccacagtggggtaaagcaacaaatagagacccctcttggggtccctgagtctaggccttaggttcttggatgacatctctggacttgctttttgccagaggggagctcactgccctgaagggtgactgaaaggatttaccacaagctgactgaagaggccataggcctttaccgaacatcagcagtaacctggcagcactcctcataggcctgtggtggtggtggacatggggagaggcccctgagcctgtggaaagggcagaatagtggaaaggactggctaatggtttgagtgccagctcagccacagtagaatagataggacaccaagcagatttctaaggttttggactccagtccatggctcccagatggcatctctggatctggctgcagcctgggggaactcactggcttgaagctagcctggctggcttcacaacagggcattgagggaacataggcagccagatcatggttacagtgggccatggcgagacccagtgtggtgccagcttcatgtctgacccagtacattctcagtggtgatggccatattggtgcttgtatctccacccccctagctctgggtggcccagaacagagggagagagagaaggagaaagggagaggagggaggggggaagggggagagagaaagagcaaaaaaagagagagagagagattgattctgtttgggagaaagtaagcaacaagaacaagagtgtgggcttgataatccagataattcttccagatagtctgcaagaaatgcagcgttattgagcttgggatgccccctaatgcagatatgggttcaatcataatatccaagttcttttgaatacctggaaatccttcccaagaaggatgggtataaacaagcccagactgtgagagctacaataaatatctaactcttcaatgcccagacattgatgaacatccacaagcatcaagaacatccaggaaaacatgacttcaccaaacaaactaaataagacaccaggggccaaacctgcagaaacaaaactatatgacctttcagacagaaaattcaaaattgccattttgaggaaactcaaagaaattcaagatagcacagagaagacattcagaactctatcagataaacttaacaaagaggaaactcaaagaaattcaagacaacacagaaaaagtttagaattctatcagataaatgtaacagagattgaaataattaaaaagagtcaagctgaaattccggagttgaaaaatgcaaccgacatactgaagaatgcatcagagacttttaataccaggattgaataagtggaacaaagaattagtgagctggaaggtaagctattggaaaatatggtcagaggagacagaagaaaaaagaataaaaaagaaagaagtacacctacaagatctagaaaatagacttaaaaaagcaaatctaagagttattggcattaaagtggaggtagagaaagagacaggggtagaaagtttattcaaaggataataacagagaacttcccaaacctagaggaagatatcaatatccaagaacaagaaggttgtagaacaccaagcagattaacccaaagaagactacctcaggcatttagtaatcaaattcctaaaagtcaaggataaaaggaaggatcctaaaagcagcaaaagaaaagaaacaaataaaatacaatggcactccaatacgtctggcagcagacttttcagtggaaaccttataggccaggagagagtggcatgacatatttaaagtgctgaaggaaaatatattcaagcataaaggagaaatgaagaccttcccagacaaacaaaagctgagggatttcatcaacactagacctgtcctacaggaaatgctaaacagagtacattaatcagaaagtaaacgatgttagtgagcaataagaaatcacctgaaggcacaaaactcactggtaacagttaagtatacagaaaaacccagaatagtataacactgtgactgtgacatgtaaactactcttcagtaaaatgactaaaagattaactgataaaaaatagtgactagaacaacttttcaagacatagtacaataagatataaatagaaacaataaaaagttaaaaagcagagggaggaagttaaagtgtagagtttattagttttcttttagcttaaaataatgagttattagacagtacttacaagcctcatggtaacctcaaatcaaaaaacatacaatggatatatacaaaataaaaagcaggaaattaaagcacaccacaagagaaaaccaccttcactaaaaggcagaagggaagggaggaaagaaggaagagaagaccacaaagccaccggaaaacataacaaaatggcaagagtaagtccttacttatcaatataacatcgaatgtaaatgggctaaactgtcaatcaaaagatatagagtggctgaatagatttaaaaaaaaaaaagacccagtgatctgttgcctacaacagacactccacctggactgaaaatgaagggattgaagaagatattccatgccaatggaaagcaaaaaagaacaggatacctatatttatatcagacaaaatagatttcaagacaaaactataagaagagacaaagtcactatataatgataaagaggtcagttcagcaagaggatataatagttttaaatatttatccaccttacactggagcacccagatatataaagcaaatattactagagctaaagagagtgatagaccccagtaaaataatagctggagacatcaacactacactttcagcactggacagatcttccagacagaaaatcaacaaagaaacatgggacttaatctgcactatagaccaaatagatatttataaaatatttcatacaacagctgtagaatacacattcttttcctcagcacgtggatcattctcaaagacagaacgtatattaagtcacagaacgagtcttaaaacattcaaataaattgaaataatatcaaacatctgactgaccacaatgagtaaaactagaaatcaataataagaggaattttggaaactatacaaaaacatggaaattaaacaatatgttcctaaatgaccagtgggtcaatgaagaaattaaacaggaaactgaaaaatttcttcaaacaaatgataatggaaacatgataaaccaaaacctgtgggacacagtgaaagcagtactaggagggaagtttatagctatacgtgcctacatcaaaaaataagaaaaacttcaaacaacctgatgatgcatctaaaagaactagagccaggtgcagtggctcacgcctgtaatcccaacactttgggaggccgaggtgggcagatcatgaggtcaggagatcgagaccatcctggctaacacactgaaaccccattgctactaaaaaaatacaaaaaacttaggtgggcacagtggcgggcacctgtagtcccagctgctggggaggctgaggcaggagaatggcatgaacccgggaggcggagcttgcagtaagccgagatcacaccactgcactccaacctgggtaacagagcaagactctgtctcaaaaaaaaaaaaaaaaaaaaaaaaaaaaaaaaaaaaaaaaagaactagaaaagcaagagcaaaccaaacccaaagttactagaagaaaagaaataataaagatcaaagcagagataaatgacattgaaacaaagaaaacaatacaaaagatcaatgaaacaaaaacggttttttgttttggtttggtttggtttggtttttttttggagacagagtctcactctgttgcccaggctggagtgcagtggtgcgatcttggctcactgcaacctccgcctcccaggttcaagcaattcttgtgcctcagtctcctgagtagctaggagtagccaggactataggcatgtgccaccacacctggctaatttttgtagttttagtagagacagggttccactgtgttggccaggctggtctcaaactcctgccctcaagtgatccacctacctcagcctcccaaagtgctgggattacaggtgtgagccactgtgcctggccaagaagttagtttcttgaaaagataaacaaaattgacaaacctttagctggactaactaaaaaaaaaaaaaaaaaaaaaaagcaaaaaaagagagacccaaataaataaaatcagagctgaaaaagaagacattacaactgttaccacagaaattcaaagatcattagtggctactatgagcaactatttgccaataaattggaaaatgtagaaaaaaatggataaattcctagatacataaaacctaccaagattgaatcataaagaaatccaaaacccaaacagatgaataacaagtaatgagatcaaagccataataaaaagtctctcagcaaagaaaatcccaggacccaatggcttcactactgaatactaccaagcatttaaagaagaactaataccaatcctactcaatctattctaaaataaacaggaggaaatacttccaaactcattctacaaggccagtattaccctgatgccaaaaccagacaaagacacatcaaaaaacaaaaacaaaaacaaaaagacctataggccaatatcattgatgaatgttgatgcaaaaatcctcaacaaaatactagaaaattgaattcaacaacacattaaaaagatcattcatcatgatcaagtgggatttatcccagaaatgcaaagattgttcaacatacacaaatcaattaatgtgatatgtcatgtcaacagaatgaagggcaaaaaccatatgatcatttcaattgatgctgaaaaagaatttgatacaattcaacatcacttcatgataaaaaaaatcctcaaaaaactgggtacagaacaacatacctcagtataataaaagccatatatgacagacccatagctagtatcaaactgaatggggaaaaactaaaagcctttcctcttagatctggaacatgtcaaggatgcctactttcaccagaagtcctagctagagcaatcggacaagagaaagaaataaacggcatccaaattggaaaggaataagtcaaattatccttgtttgcggatgatatgatctcatatttggaaaaacctaaagactccaccaaaaaactatcagaactggtaaacaaattctgtaaggttgcaagatacaaaatcaacatacagaaatcagtagcctttctgtatgccaacagcaaacaatctgaaaaagaaatcaagaaaataatcccattgggaggagccaagatggccgaataggaacagctccggtctacagctcccagcgtgagagacacagaagaccggtgatttctccatttccatctgaggtaccgggttcatctcactagggagtgccagacagtgggcgcaggccagtgggtgcgcgcactgtgcgcgagccgaagcaaggcgaggcattgcctcacctgggaagcgcaaggggtcagggagttccctttccgagtcaaagaaaggggtgacggacgcacctggaaaatcgggtcactcccacccgaatattgcgcttttcagaccggcttgaaaaacggcgcacctagagactatatcccacacctggctcggagggtcctacgcccacggaatctcactgattgctagcacagcagtctgagatcaaactgcaaggcggcagcgaggctgggggagaggtgcccgccattgcccaggcttgcttaggtaaacaaagcagccgggaagctcgaactgggtggagcccaccacagctcagaggcctgcctgccactgtaggctccacctctgggggcagggtacagacagcagtaacctctgcagacttaaatgtccctgtctgacagctttgaagagagcagtggttctcccagcacgcagctggagatctgagaaccaacagactgcctcttcaagtgggtccctgacccctgacccccgagcagcctaactgggaggcaccccccagcaggggcacactgacacctcacacggcagggtattccaacagacctgcagctgagggtcctgtctgttagaaggaaaactaacaaacagaaaggacatccacacagaaaacccatctgtacatcaccatcatcaaagaccaaaagtagataaaaccacaaagatggggaaaaaacagaacagaaaaactggaaactctaaaacgcagagcgtctctcctcctccaaaggaacgcagttcctcaccagcaacagaacaaagctggatggagaatgactttgacgagctgagagaagaaggcttcagacgatcaaattactctgagctacgggaggacattcaaaccaaaggcaaagaagttgaaaactttgaaaaaaatttagaagaatgtataactagaataaccaatacagagaagtgcttaaaggagctgatggagctgaaaaccaaggctcgagaactacgtgaagaatgcagaagcctcaggagccgatgcgatcaactggaagaaagggtatcagcaatggaagatgaaatgaatgaaatgaagcgagaagggaactttagagaaaaaagaataaaaagaaatgagcaaagcctccaagaaatatgggactatgtgaaaagaccaaatctacgtctgattggtgtacctgaaagtgatggggagaatggaaccaagttggaaaacactctgcaggatattatccaggagaacttccccaatctagcaaggcaggccaacgttcagattcaggaaatacagagaacgccacaaagatactcctcgagaagagcaactccaagacacataattgtcagattcaccaaagttgaaatgaaagaaaaaatgttaagggcacccagagagaaaggttgggttaccctcaaagggaagcccatcagactaacagcggatctctcggcagaaaccctacaagccagaagagagtgggggccagtattcaacattcttaaagaaaagaattttcaacccagaatttcatatccagccaaactaagcttcataagtgaaggagaaatcaaatactttacagacaagcaaatgctgagagattttgtcaccaccaggcctgccctaaaagagctcctgaaggaagcactaaacatggaaaggaacaaccggtaccagccgctgcaaaatcatgccaaaatgtaaagaccattgagactaggaagaaactgcatcaactaacgagcaaaatcaccagctaacatcataatgacaggatcaaattcacacataacaatattcactttaaatgtaaatggactaaattctccaattaaaagacacagactggcaaattggataaagagtcaagacccatcagtgtgctgtattcaggaaacccatctcacgtgcagagacacacacaggctcaaaataaaaggatggaggaagatctaccaagcaaatggaaaacaaaaaaaggcaggggttgcaatcctagtctctgataaaacagactttaaaccaacaaagatcaaaagagacaaagaaggccattacataatggtaaagggatcaattcgacaagaagagctaactctcctaaatatatatgcacccaatacaggagcacccagattcataaagcaaatcctgagtgacctacaaagagacttagactcccacacattaataatgggagactttaacaccccactgtcaacattagacagatcaacgagacagaaagtcaacaaggatacccaggaattgaactcagctctgcaccaagcggacctaatagacatctacagaactctccaccccaaatcaacagaatatacatttttttcagcaccacaccacacctattccaaaattgaccacatagttggaagtaaagctctcctcagcaaatgtaaaagaacagaaattataacaaactatctctcagaccacagtgcaatcaaactagaactcaggattaagaatctcactcaaagccgctcaactacgtggaaactgaacaacctgctcctgaatgactactgggtacataacgaaatgaaggcagaaataaagatgttctttgaaaccaacgagaacaaagacacaacataccagaatctctgggacgcattcaaagcagtgtgtagagggaaatttatagcactaaatgcccacaagagaaagcaggaaagatccaaaattgacaccctaacatcacaattaaaagaagtagaaaagcaagagcaaacacattcaaaagttagcagaaggcaagaaataactaaaatcagagcagaactgaaggaaatagagacacaaaaaacccttcaaaaaatcagtgaatccaggagctggttttttgaaaggatcaacaaaattgatagaccgctagcaagattaataaagaaaaaaagagagaagaatcaaatagacacaataaaaaatgataaaggggatatcaccaccgatcccacagaaatacaaactaccatcagagaatactacaaacacctctacgcaaataaactagaaaatctagaagaaatggataaattcctggacacatacactctcccaagactaaaccaggaagaagttgaatctctgaatagaccaataacaggatctgaaattgtggcaataatcaatagtttaccaaccaaaaagagtccaggaccagatggattcacagccgaattctaccagaggtacaaggaggaactggtaccattccttctgaaactattccaatcaatagaaaaagagggaatcctccctaactcattttatgaggccagcatcattctgataccaaagccgggcagagacacaaccaaaaaagagaattttagaccaatatccttgatgaacattgatgcaaaaatcctcaataaaatactggcaaaccgaatccagcaacacatcaaaaagcttatccaccatgatcaagtgggcttcatccctgggatgcaaggctggttcaatatacgcaaatcgataaatgtaatccagcatataaacagagccaaagacaaaaaccacatgattatctcaatagatgcagaaaaagcctttgacaaaattcaacaacccttcatgctaaaaactctcagtaaattaggtattgatgggacgtatttcaaaataataagagctatctatgacaaacccacagccaatatcatactgaatggggaaaaactggaagcattccctttgaaaactggcacaagtcagggatgccctctctcaccactcctattcaacatagtgttggaagttctggcccgggcaattaggcaggagaaggaaataaagggtattcagttaggaaaagaggaagtcaaattgtctctgtttgcagatgacatgattgtatatctagaaaaccccattgtctcagcccaaaatctccttaagctgataagcaacttcagcaaagtctcaggatacaaaatcaatgtacaaaaatcacaagcattcttatacaccaacaacagacaaacagagagccaaatcatgagtgaactcccattcacaattgcttcaaagagaataaaatacctaggaatccaacttacaagggatgtgaaggacctcttcaaggagaactacaaaccactgctcaaggaaataaaagaggatacaaacaaatggaagaacattccatgctcatgggtaggaagaatcaatatcgtgaaaatggccatactgcccaaggtaatttacagattcaatgccatccccatcaagctaccaatgactttcttcacagaattggaaaaaactactttaaagttcatatggaaccaaaaaagagcccggattgccaagtcaatcctaagccaaaagaacaaagctggaggcatcacactacctgacttcaaactatactacaaggctacagtaaccaaaacagcatggtactggtaccaaaacagaaatatagatcaatggaacagaacagagccctcagaaataatgccgcatacctagaactatctgacctttgacaaacctgagaaaaacaagcaatggggaaaggattccctatttaataaatggtgctgggaaaactggctagccatatgtaggaaactgaaactggatcccttccctacaccttatacaaaaatcaattcaagatggattaaagatttaaacgttagacctaaaaccataaaaaccctagaagaaaacctaggcattaccattcaggacataggcatgggcaaggacttcatgtccaaaacaccaaaagcaatggcaacaaaagacaaaattgacaaatgggatctaattaaactaaagagcttctgcacagcaaaagaaactaccatcagagtgaacaggcaacctacaaaatgggagaaaattttcgcaacctactcatctgacaaagggctaatatccagaatctacaatgaactcaaacaaatttacaagaaaaaaacaaacaaccccatcaaaaagtgggcgaaggacatgaacagacactaatcaaaagaagacatttatgcagccaaaaaacacatgaaaaaatgctcatcatcactggccatcagagaaatgcaaatcaaaaccactgtgagataccatctcacaccagttagaatggcaatcattaaaaagccaggaaacaacaggtgctggagaggatgtggagaaataggaacacttttacactgttggtgggactgtaaactagttcaaccattgtggaagtcagtgtggcgattcctcagggatctagaactagaaataccatttgacccagccatcccattactgggtatacacccaaatgactataaatcatgctgctataaagacacatgcacacgtatgtttattgcggcattattcacaatagcaaagacttggaaccaacccaaatgtccaacaatgatagactggattaagaaaatgtggcacatatacaccatggaatactatgcagccataaaaaaggatgagttcatgtcctttgtagggacatggatgaaattggaaatcatcattctcagtaaactatcgcaagaacaaaaaaccaaacaccgcatattctcactcataggtgggaattgaacaatgagatcacatggacacaggaaggggaatatcacactctggggactgtggtggggtggggggaggggggagggatagcattgggagatatacctaatgctagatgatgagttagtgggtgcagcgcaccagcatggcacatgtatacatatgtaactaacctgcacaatgtgcacatgtaccctaaaacttaaagtataataaaaaaaaaagaaaaaaaataatcccatttataatagctatgaataaaatagctaagaattaagtttaccaaagaagtaaaagatctctgcaatcaaaactataaattgattgcaatgatgcaagaaactaaagaggacaccagaaaaatggaatgatattccatgctcatggattggaatattgttaaaatgtccacactgcccaaagcaatctacagattcaatgcaatctctatgaaaataccaatgactgtcttcacagaaatagaaaaaaaatcctaaaatttgtatgggaaccacagaagacccagaaaagccacagctaatctaagccaaaagaacagaactgtaggaatcacactacctgacttcaaattatatgacagagctataataaccaaaacaacgtggtattggcataaaaacagacacacagatcaatggaacagaaaagagaactcagagataaattcatacatccttagtaaacttgttttcaacaaaggtgccaagaacatacattggggaaaggcagtctcttcaataaatgatgcaaggaaaaactgcatatttatatgtagatgaatgaaagtagaccccatctcttgtcatatgcaaaaattgaatcaaaatggattacagacttaaatctaagacctcaaactatgaaactactccaagaaaaccctggggaagtctgagcatggtggctcacgcctgtaattccagcactttgggaagccaaggtgggtggatcacaaggtcaagagatggagaccatcctggccaacatggtgaaaccctgtctctactaaaatacaaaaagttagccgagcatggtggtacatacctgtagtcccagctactcgggaggctgaggcaagggaattgcttgaactcaagaagttgaggttgcagtgagccaagattgtgccactgcacttcagcctggtgacagagcaagactctgcctcaaacaaaaacaaacaacaacaacaaaaaaaccacttgggaaactctccaggacactaaactgggcaaagatttcttgagtaatacttcacaagcacaggcaaccaaagcaaaaacggacaaatgagatcacaagttaaaaagcttctgtaaagcaaaggaaacaatcaacaaagtaaagagacaacagaatgggagaaaatattcaggccactgaattcattttaaatgatagattcttccccttgcctcatcccagaaccactctgtatcttcaggggctgggtccaggcacctagagagtttgtaaaaattccacaagaggttctgatgtacaggcaggactgagaacccccagttagtgcaaaggagagtgtcttcctatggtgacttctatcattaaaaatctacttctgaacttgggctgcaaagtagcaggaagaaaaccaccagctgagttaggtttccatgagcaagagattcttacccaaggttcaatcataaattacatgacttgaaagcaaattctctaaaatgagcatgttgcccaagatcttaaaaataaatagaataggccgggcacagtggttcatgcctgtaatcccagcactttgggaggccagggtgggcgaatcaccttaggtcaggagttcaagacaagcctggccaacatggcaaaattccgtccttactaaaaatacaaaaattagctgggcgtgatggcgggcgccggtaatcccagctactcgggaggctgaggcaggagaatcacttgaacccgggaggcggaggttgcagtgagctgagatcacgccacttcactccagcctgggcaacaagagcgagattctgtcaaataaataaataaacaaataaataaaaagaataaaataaaatgagatggcacagtatcaccacccttccccatcagtaatcactcagtgcaggaatacccctcaccctgcggctttacaagcatcaattactctggtgtttttaggctgtggaggtggatggtaatttacaaccgatcagagaaagaaagaaaataagtagccagagtagactcccatatgtggtatgtgccgaaaatggaaaattcatcttattaagtggaacagctccctcagcacttttcacagattccctaggatatcctacgattgatacgtttcaatgagccatctttatctgtgttttggttccaactaaatattaattcatagatgcgctaaagaccccacattcttaattccagattattttatgaagatatcactttaaggccgggtgtggtagctcacgcctataatcccagcactttgggaggctgaggctggtggatcacaagttcaggagatcgagaccatcctggccaacatggtgaaactctgtctctactaaaaatacaaaaattagccaggcgtggtagcatacgcctgtaatcccagctacttgggaggctgaggcaggagaatcgcttgaacccaggagcggggttgcagtgagccgatatcgcgcctctgctctccagtctgggcgacagagagagactccatctcaaaacaaaaacaaacaaacaaacaacaagaaaactccaaaaatacaaaaactagtgtttcccagaacacatgctgagaagtgtgttcatcaggaaacgacagagctcatcccatagcactgaaaacattcccgctcatttctgagaatctttgctgaatctttacacaaagggtaaagttactccactcgaacctgtgggcttatctttctccatggcacattctaacagcatgtttgtgcctgtccttccttctcacaaaacacaataaaggtccttctagtgaaaagtactctgaatgggtctctcaaagcacttgtttaacaggaaagcttagttgggctagaggatttcctttctttaaaaaaaaaagaaagcaactttctgtgctacaaccctcattaaagaaactagcgcagttcaggctgcttaggcagtgttttgctagaatgggtgctggtccctggtgttagtctggtggtacctcgcagggtgactcatgttctgatgtcttaaagaactgattctctgaaggaaattattcaggatgtgaaatgtcaagaaagacagatgatgattaaaaaaagaaagagaagtcagggtgacactgaccttaactgggaaattgcacaaatgagaatatagtgggaaaggaaagagggatgaagagggcaaagagaggaagggaggaaagaaggagagcagactggctgtgagggaggcagggcacatgggaaatgggaggaaagaggtctggcatttactgaacatcatctgtgtgcttgggaagggcgcagagaggtattagaataagaatttttgtaaaaagtcacaggcaaagtcatttgatatgggttttgagaagcgagaaccacccaaatcccctaggaatataaatcacccttggaaaacatgactaagattcaagactgagcattttttttttttttttgagatggagtctcactttgtcacccaggatggcgtgtagtggtgggatcttggttcactgcaacctccatttcccaggttcaagcgattctcctgcctcagcctcccgagtagctgggattataggtgtgcaccaccatgccgggctaatttttgtatttttaatagagatggggtttcactatgttggccaggctggtctcgaactcctgacctcaggtgattcaacttccttggcctcccaaagtgctgggattacaggcatgagtcaccacacccggccaagactgagctcttttaatgcccatataccgagggtagaaatctacaaaacgtatgacctgcaaactgaatgatcaggaaaggatcctaaccaccagaatgggcaggcagagttgtaaaaaaacaggggatgagagtttccacccactacatgcgtctctgacatttctgcaggcacccaatcccggtccctttgctgtgtctcggactacacatctgatggcgtgccaccaagcaccaagagcaaagttgaccctggaccccatggagccaattctcctgccaccccatcagatatctacatttggtagagattccaaaattgtgataggagactaagcagtgcaattagcggggaaaggaatgaggaagaagcatgttttattcactgtttgggcaatcaactagaacttccttgtaacttgtctggctgcttcagctttagctagttcaccaatatccagtctggacctgttatgacagaggccaccttcctgttcagattggtgggaattccattttctttctttctttttttttttttttttttttttttgagttggagtttcactcttgttgcccaggctggagtgcaatggcaccatctcagctcactgccacctctgcctgccgggttctagtgattctcctgcctcagcctcccaagtagctgggactacaggcacttgccaccacgcctggctaatttttgtatttttagtagagagggggtttcaccatgttggtctggctggtctcgaactcctgacctcaggtgatccacccacctcagtctcccaaagtgctgggattgcaggcatgagccactgtgcccggcaggaatttcactttaattttggtcaagtatcatgagtttagtaccttctgattcaaggcagaaggcacttaagctcaatcctcaacagcttgaaatcaaaaccagaaacccactctaagaggtaatccatctaaatgtttgctatggaaaggtagcggacacacaacatacaggagtcaatggcctccccacatttgggtgagatggggctcccggggtgcatgcactccccacactgagaatctccccacaggcagattctgtgaccagaacaggaagaatcattgcagaaacgggatttcatgcatatcacatcttctacaggttaaaattattagaaaaaaatagctcatccagatagcagaacccaagaaagagaaactagagggggggtttggcatgggggaaaaagaggcttctagaaagcctgcaagggcagaatggcagtaacagagacctcgggaaaaccagctaaaatccgaggcttctctgactaaggctgcagggaggcgtgtctggagcgctgaaaccagaacactatgatgatttctgtgaatgtgatgctaaggttgttcggctagaattttacggaacaccatggaggaaatattttcagcctgatatcaaatctggggtccagagagaaaagtctcagcttgctcatggagaagagctacaagagaagcccacatctgtttgccagggtgggagaaccagcaggagatgaaatagaaaagccacaaaagaaaaggcatcatggtaaaagcaagccatgttctactgccctcagtgatgtactgtctgcggtcacttacactcaacattggcagagaccacgtggtccacaaagcctaaaatgtttacttgctggccctttacagaaaaagtttgctggccttggtctagaccctgcctctgatgctggcctgaccctgggcagaccatatacatatatatatatacacacacacacacatacacaaggatggttatttatataactcataccgccaatttaacaatactaatagttaacatctaagactgattgatatgtatcctttaaaaatttctgggtgcagtaacatgcagattcttgcccgcataactccattttaagaatatatacactggctacgcatcgtagctcatgcctgtaattccaggagtttgagaggttgaggtgggcagatcccttgagctcaggagtttgagaccagcctgggcaacatagtgaaataccatctacacacacaaacacacacacaaatacaaaaattagttggacatactggtgcatgcctgtagtccagctactcaggaggctgaggtaggaggatcacttgagtccaggaggtcaaggctgcagtgagccgagttcacaccactggactccagctggggagacacagtgagaccctgcctcaaaatatatatatatatatatatatacacacacacactaacaaagaccttaatgtattttctctgcagaacttgtcagatatgctctcccagcccttcttactaaggacaatgggtacttgtccaagcccatccaccattctgtcagtcgcatcctaagaagagatcagagaagattccctcctagaccacgcaaaatagaccgatcatctttggcacgtgtggccatgacccacatgaggatttataagcgacctagtcaccgggacttcatgtggttaccttttctgaatggctcccggttctcctctgcttccctgttgactcggttttgttctggttcaacagcagacccctggtcatcaagttcatcttctgtttcatcatcactgtagggaaccacttcgtcattaggctgagaatcctcgtcaaatgtcgtttctgagtctctttctgtactcattctgctggcaaattggaactacctgcttaaaaggaaagagaaaccagagtgaattatgactcttgcccagtttttggttgaatactgcctgcatgctgctacaatgccccttttacagaacattgtctaacatgtaaatattctggaatagtacccccaaattcaacttgacatgaaaacaagaacaaaaccattcagtactgattaaatgcttgggtaagatttttttaaaaaatatggagctgcaaaccttttatttttaaacaagggtatatatatatatgtatgtgtgtatatatatgtatatatgtatatatatgtgtatatatatgtatatatgtgtatatatgtgtatatatgtatatatatgtatatatgtatatatgtgtatatatgtatatatgtgtatatatgtatatatgtgtatatatgtatatatatgtgtatatatgtatatatgtgtatatatgtatatatgtgtatatatgtgtatatatgtatatatatgtgtatatatatgtatatatatattcaaggcaatatttcaaattagggggtctcaatgaaataaatttagtgggtaacaatcaacattaaaataaaatgaaacaggctataaaatatcagattacagcacatataataagtactgcttgataaaatagttgtatacattcacacgtttatttgcattgtgggtgttagtggagttgaatttcttttttttctttttttgagaatagagtctccctctgtcacccaggctggagtgcaatggcatgatctcggctcactgtcacctccgcctcctgtgttcaagtgattctcctgcctcaacctcccaagtagctgggattacaggcacacaccaccacgcccggctaatttttgtatttttagtagagacggggtttcactgtgttagccaggatggtctcgaactcctgacctcaagtcatccacccgcctcggcttcccaaagtgctgggattacaggcgtgagccaccgcgcccggccggagttgaatttcttactgtggattgctggcaaagttgacaaaccactgctctaagatatctggtttctgctaacactaacgtcctgagcctttgttctgatacaacatttttaatataaccttagatcttccaagtttactgacttcccaggaacactccctagcctttctatcttcctaactaccactgcccactctgtatctggaatttgtgtttgagcatctaccgcataagatgaccccatacaagtgagaagaacaaccttagttagatttattttaggaaaatatttacacaaatacctcaggttacagacacacagcctggcatttacataagcatcacagtgccgtgtagtcagtattgttaatgacagcagctcgcatttattttgtgttaactgcatgccaagccttgcactaagcactttatagacatgtgctctttgaaacttcccacaccaccatggtgaataacagtattattgttattcctacccagcagaggagaaaaatcaaaacactggagtgctaaataatttgcacaatgattattaaaaatttaaggcagccacgcacggtggttcacacctgtaatcccagcactttgggaggccgaggtgggcggatcacgaggtcaggagatcgagaccatcctggctaacacagtgaaaccccgtttctactaaaaatataaaaaattagccagacgtggtagcgggcacctgtagtcccagctgctcgggaggctgaggcaggagaatggcgtgaacccaggaggcggagcttgcagtgagccgagattgcgccactgcactccagcctgggcgacagagcgagactccatctcaaaaaaaaaaaaaaaaaaaaatgtaaggcaaaaacaactgcttcacaaggagaggtctatgctctatttttgtactatggtttatgatatattttgagtgaaaattgcctcaagtagaactatgtagctgattgcaagttttgcaccaaatcttagatctctaaaataatttttacattcacaaatggagaaattttcaaatatttatatgaggatttttaccaagtattatgtaaaacagtaaaagccaaaagcaagctgggttacaattgtcgactgtgtaaataaattgtggcatctcatattataggataatgtgcaacaatctaggtgatccgaagagtatttgatgacattgcattaatgaccttaagttaataggtaagttataaagccatatgtatagaatacacccagttattcacacacacacttgttcattttccaaaatttcaacaattgacatacattattttattattattatcttttgagacagagtatcgctctgtcacccaggctagagtgcagtggtgcaatctcggctcactgcaacctctgcctcccaggttcaagcaattctcctgcctcagcctcctgagtagctgggattacaggcatgtaccaccatgtctggctaatttttgtatttttagtagagatggggtttcaccatgttggccaggctgggacatacattattttaagtgagatgatgcatgcaaaatgctcaactcagtacctagcctgcaataagtattcaatgaacattaactgttaatttttcatatacttcttggcgatttgtatgtttccttttgaaaaatgtctattcatgtcctttgcccactttttaatggtattattattattttaaaatattgctggcattcattattacaaagaacaacttagattctactgcatgatgctgtactgtggcacagttctaaagagccctatagtcatggatgcaaagttcctagcactactggtcctcagcacctcaggccattatcttatggcttcacagaatattcattccccaaatccatagtctttacctctggccttagcttttcagtagcaagcacaagcattcctggtgagagacagggctagctggatttcctaggccgactatgaatccctaagtctagctgggaaggtgactgcatccacctttaaacaggaggcttgcaactgagctcacacctgaccaatcagagagctcactaaatgctaattaggcaaaaacaggaggtaaagaaatagccaatcatctattgcctgatgaactcatctattgcctgatgagggacaaggatcgggatataaacccaggcattggagccagcaagggcaaccccctttgggtcccctccttgtatgggagctctgttttcactctatttcactctattaaatcttgcagctgcacccttctggttaccgctagaactgagctttcgctcgccgtccaccactgctgttttgctgccgtcgcagacccgccgctgacttccatccctccaatccagcagggcgcccgctgtgctcctgatccagggaagcacccgttgccactcctgatcgcgctaaaggcttgccattgttcctgcatggctaagtgcctggtttcgtcctaatcaagctgaacactagtcactgggttccacggttctcttccgtgacccacgacttctaatagagctataacactcaccgcacggcccaagattccattccttcgaatccgtgaggccaagaaccccaggtcagagaacacgaggcttgccaccatcttggaagtggcctgccgccattttggaagtggcccaccaccatcttgggagctctcggagcaaggacccctggtaacactggcagtacttatactttcattggttatacttatacttccccggttatatttatactttcctggcagtacgtatactttcatggtttatactattttaaaattattttttattaaatggagccaaattttttaaaagtcatcttttccactaaattgacatcaccatgttaaatctaaatttccctactaagtctttattttattttactttaagttctaggatacatgtgcagaacatgcaggtttgttacataggtatacatgtgccatggtggtttgctgcacccatcaacccgtcatctaggttttaagccctgcatgcattaggtatttgtcctaatactctcccattccttgccccccccacccccacccccaacaggccccagtgtgtgatgttcccctccctgtgttcatgtgttctcattgttcagctcctgtttatgagtgagaacatgtggtgtttagttttctgttcctgtgttagtttgctgagaaagatggcttccagcttcatccatgtccatggaaagaccacgatctcattcttttttatggctgcagggattatttgtttttgagttgtttgagttccttgtatatttctggatactagtccttagttagatgaatggtttgcaaatattttctcctattcagcaggaaacactgttgattgcttcccttgctgagtagaagctttttagtttaatatagtcctatttgtctatttttgttgttgttgttgcctgtgcttttgaggtcttagccataaaatctttgcctagaccaatgtcctaaaacattttccctatgttttcttctagtataaagttttattagttttttttttttttttttttttgagaggagggtttcactctgtcactcaggctagggtgtagtaggacgatcatagctcattgcagcattgaactcttgggctcaaggaatcttcctacctcagcatcccaagtaactgggactaccagtgcatgccaccatgcctattttttttttttttttgtagcgatgggatctcactgcattgtccagactggtcttgaattcctgggtcaagtgatcctccaggcttgggctcccaaagtgctaggattataggtgtggtcccatttaagtctttaatccatcttgagttgacttttgtgtatggtgagagacaggggcccagtttcattctttagcatgtggggatttatttctgggttccctattctgttccattggtttatgtgtctgtttttagcccatattatgttttggttactacagccttgttatatatatatgtatcaaggtgactgtgaaggtactatatggaaacattttttattgttgtaaaatatatgtacataaaatttaccattttagccattttgttttgtttttctcattgcagcctcctgggctcaagcaattctcccacctcagcctcctgagtagttgagactataggtataagccactacatccgactaatttttgtgtttttagaagagacagggttttgccatattgcctaggctggtctcaaacttctgggctcaagtaatctacctgcctcagcctcccaaagtgctgggattacaagcatgagccaccacgccaggctttgtttctccctacttttatttttttttaatttcttaaagctgtaccattggagaattttaactttttgtttgttggttggttttctttctcttattattgttattatttttttgcatctcagatgacacaaaccattgtttgtttcctgagacatggtttcactctgccaccgaggctgcagtgcagtggcatgatcctagctcactacactctcaaatctgagggctccagcaatcctcctaccctgctccccagcctccctagtaactaggactagaagcacaagccaccatgcctggctttttttttctttcttttctttcttttttttttaaaagagataggctctccctatgttcctcaggctggtctcaaactccgggccccaagcaatcctcccacctcagcttccttttagcccttttcaagtgtagggttctgtggcattaagtgcatttatacaaacattttgtaagttatccttttcatcattgcttccaaactgccaggcatctggatattaagactgtctccagccctttgaggttgagagaggaagcaagcacggaggaatggatttgacaacccacatgtccgtgactcaaagcaagcaaggccttgcacaaccaactcgccacccacacaatctgcacagtctcagtgagaaagcaggagcagggagctctccgctgagagtgaagaaatgtcctcaactcaacttctctgcagtgtgcatgtgtgtgaaacgcagacacacacgggaggaatttggctctgtcattttagtgtaccaaagaaaaaaaaacagggagaaatcacttgtttgaagccctaaatgacataaggaagattttcccagatctaaataatgatccctaaggtcaggtgctgtgtatggtatggatttggaaacttcataatgtctctgaccaccactccaggacactgcagacaggtgtgcatttactcagcatccagtaaacacctgcaaggtgcagagtactacactaggcacagggaacagagctactgactgactgccagagtttcgaagaatacagataagtcaactattaaagctaggaaacagaccggatgcggtggctcacgcctgtaatcccagcactttggaagaccgaggcgggtggatcaactgaggtcaagagttcaagaccagcctgccaacatggtgaaactccgtccctattaataatacaaaaaaattagctgggcatggtggcacatgcctgtaatcccagctattcgggaggctgaggcaggagaattgcttgaacccaggaggctgcagtgagctgagatcgcgccattgcactccagcctgggcaacaagagcgaaactctgcctccaataaataaataaataaaataaaataaaataaagccataaaacagtaaagccagtcgtttttgcctcaaatactcctccaattcatcacctcctctctatctccatggccaccatcatctctccctggaaatgctgcgagatccctctaactagactttccacaattaacttccacatgaccaccaaaggcatgccattctcctgcttacacccttcctgggtgttatggattgaattatggcccccgaagtcatatgttgaagccataacacccctcaatgtgactacatggagagaggtcctttaaggaggtagttaaggttaaataaggtcatcagatggggccctaatccaataggacttgtgtattttatttttattattttttagactcagtttcgctctgttgcccaggctagagtgcagtggcatgatctcagctcactgcaacctccacctccctggttcaagcgattctcctgcctcagcctctcaagtagctgggattacaggtgcccgccatgacactcagctaatttttttgtattttcagtagagacagggtttctccttgttggtcaggctggtctcgaacttctgacctcaggtgatccgctcaccttggcctcccaaagtgctaggattacaggcatgagccaccatgcctggccaatttcttattcgttaggtctcaacttcagtgtcctcttccactcatggtattgagcaggattctgccctcctcttcctgctaccactggcccccttgagcacctacatttctgtttccttcctaacacttatcatgatttgtaaacatgcatttgctttcatttatctgcctttcccaccagaccataaactctacaagaacagattggtctgtgaatactcagtgcctactacacagttgacactgaaagatctggggaaagagcaaatcaactttcaataaagtcttcaagggctcagagagttgtcttacaccaaagttctttaccacctttacacaggtcacacctaccacatggtaacagattcacaaagtcattggactagggatgaaagattgagggcaatgatgggagaaaacagcaacagttaaggtcagaagtcatacaagatgaaactttttaggagtctgagtcatttgaggccatccaaaaaccattgtccaagattttaccatgtacgcaaaaccaaaccagccctctagtagggtactgaagatatcaaaggtgaggaccaatctttcttgtccatcactagcacctaccagagtctggcatataggaggctcgtttgtttctgtacttaggaggcttatagtctagacaagaattggcaaattgcagcccatgggccaaattcggcccactacctatttttttagataaagttttattagaatgcacccttactcattactgacataccggctatggtagttttgttttttgttttgtttgtttgtttgttttgagatggagttttgctcttgttgcccagactggagttcaatggcgcgatctcagctcactgcaaccttcgtctcctgggttaaagcaattatcctgtctcagcctcctaagatgctgagattacaggtgtaagccaccacgcctggtccttcatcatttttttttaatggcttttaaagttcacaagaagaaagactatttccgaaatctgtttttcctcattttgtttattattattattaaagacaatgctgtaaaatatttaacatatcgtaatatataataagtatgaattatatttctatatgttctatgctatacgtgtttcttattatatgttccatactaaatataaattactactctaagatggcccccagtgatcccaccttttggtgttcacatctttaatttcctgtgagtgtggcatacacatgaggtggtttgcttcttttttcttcctttttttttttttttttggttgttgattcaagttcttgctctgtcacctaggctggagtacactggggtgatcaagctcactgcagcctcaatctcccaggctcaagtgatcctcctgcctcagcctcctaagtagctgagactaaaggtgtgcaccatcacacccagctaatttttttggtttttagtagagatgaggtcttgctagtttgctcaggatgctcttgaactcctgaggtcaagcaatcctccctccttggcctcacaaaatactgggattacaggcatgagctaccgtatccagccccttttccttctttcttcttcttcattttcttttttttaaaataagcctgagttcctgaaccttgctgctttattttttgagatggagtcttgctctgttgcccaggctggagtacagtggcgcgatcttggctcactgcaacctccacttccctggttcaagcaattctcctgcctcagcctcccaagtcacggggattacaggcgtgcaccaccatgccaggctaattttttgtatttttagtagagacagggtttcaccatgctggccaggctggtcttgaacttctgatcttgggatccacccaccttggcctccccaagtgctgggattacaggcatgagccactgtgcccagcttgaaccttgcttctaaccaatagaatatggcgcaggtaatgggatgtcacttccatgattaggttataaaaaaccatgacttcttgttgccagccaactctttccccttccttgctttggtgaagcagctgccctatggagaggctcacatggcaagatgtgaagttagcattgaccaacagccagcagggactggagccctcagtccaatagtccttaaggaatgcagtgaattttgcaatcactacatgaacttgaaagcagatccttcctcagtcctgccttcagatgagacatcagctgggctggcaccttaattgtagccttgtgagaaatcctaatacggagaacccagttaagctgtgctcagacacttgattcatggaaactgtgagataataaatgcgtgttggtttaagctgttaagttttggagtagcttgttacacagcaatcgacaaccaatacacataccattagtcacaagcagtaattctagggtcaggcactcaatgtagccactattatttccaagttattccaaagagcccccatctaaaaggtagcagaaatcttctctattttcctagttagtccagacacatgccacaccctgtttggagtctgcccagtattcttttatttacttatttgagacagagtctcactctgtcacccaggctggagtccagtggtgtgatctcagctcactgcaacctctgcctcccaggttcaaatgattctcctgcctcagcctttccagtagctgggactacaagtgcatgccaccacacctggctaatttttgtatttttagtagagacagggttttaccttgttggccaggctggtcttgaactcctaacctcaagtgatccacccacctcggcctcccaaagtgctgggattataggcatgagccaccacgcctggccaatgctcagtattcttgaaagtaaaatgacaaacttgatgacagttgtaattagataaagaatctcatgaagcaatagtaataaaatgtatctaagatctgcattaaatttaaactttatactgttatagaaacagcgtaattacagttcccagcaggaacaggattacattttttatttcctcccaaggcaggacctaaaaaatctagaagcctgggataaataacataaaactaaggtatcaacagtatcactgtggtggggacaattcagccaggatctttacatatgatagaaaaggcttctctgagtccacagcttcaccccctattcctcagaaaatccgccccagagccctttctcacaaaggaagattggctgcctgggtgtggtggctcacacctgtaatcccagcactttgggaagctgaggcaggaggatcatttgaggccaggagttcaagacgagtctgggcaatatggcaagaccccatctctacaaataataatttaaagaattagctgggcacctgtagtcccagctacttgggaggctgaggcagaaggatcgcttgagcccaggagctcaaggctacagtgagttaggatcttgccacttaacttcaggctaggtgacagagcaagaccccatctctataaaaaaaaaaaaaacaaaacagactggttcttgtttcattctgtacaacttcaatgcggtcattagaaaaggtacaggggaaatctcaaaaccttgacatttcagagatgagcagctttttcattcccctggctaaggttcaaaggatttcttagtccagcattgccatgggctcacagcatttcctagtaatattatatttcttcttatccataaaaggcagccccttccaggacaaaggatttttcatacagattgtctcatgcaattgtcatggaattatgctgaggcatgtcgccaggcaatgtcattaccttcttactaatgaaaaaactgaggtggtttcaaagcttgcccagggtgatttagctcctagctattcaggccctttccacacatatcccagctctgtgctctctgtggtacagtgaacgcatcgtagattcagattggaattcaagctctgcccaggaagcatcagagcctgctctccactcccaacatcacctacttccctcccttccccacacctactaacaacatcattagtcacaagaaaaccctaagcaaaggaagaatttgacaagcaaaaaatatcaaactttgaggtctacaggcagatctatcctacaccagtgaattctaaaatgtaaaatgcttcccaatgtatgccgctgaagagtgaagtgagagcaatcattatttcctagacggtttttgagctgggcaacctgggagtcacagaggtgagcaagaacttggggtgggtgggagagagatattaaggaactaaaaaaacctcagaggcaggaaaatgcaatggaaaggcccagcaccggcgcaggtgggagatctgggggaaagagcagagctggggaaaggtagttttggagtcacctccaaaagtaaggcagctcatgcagccttgagaaggctttattccagggagttagagggcccatggaaggtgtctgcaaaggaaagaaatctgatctgcacagcactcatctgacagggggaagggtgactgggaaggtgagagcctgggagggagactgttcaaaagtcaccctggaaacagcatctccttgtcacagtttcttcacctggaacaccaagtggttctaccttattacctccaccatcacactcagcaacaacactcagtgcatgaatctagccacagcaagaagaaatacaggcctgggccgaacgcggtggctcacacctgtaatcctaacattttgagaggccaaggtgggctgactgcctgaggtccggagtttgagaccagcctggccaagacagtgaaaccccatctctactaaaaatacaaaaattagccaggcatggtggtgtgtgcctgtagtcccagctacttgggaggctgaggcaggagaatcgcttgaacccgggaggtagaggttgcagtgagccaagatggcaccactccagcctgggtgacagagtgagactgtctcaaaaaaaaaaaaaaaaaagaaagaaatacaggcctgaactagggtggtggcagccagaaaaatgtgcttaaaatgaaggcagggtggggctgccattcttttgtctagaaaatgaaggaaaaaaaaagtaaataaaagactggggctggttcccataggataagaatgctgtcatttccccagatgtttattttggagactcggcctcaatccacaatgtacttttatagtaaataatgaaagttaccaggagaaaaccctggttatttttacgttcaagcgtcatccttagttgttagggacaatggcctcatttttaccccattactattgactctataattaggctttaaagttatattcatgtttaaataatacaaagtcataggagctttataattgacagctacctggaagcaaacccttcagggtaaaataagtctgtcaagctgaattaattttaatgttagaagagtcaccaagctattaatacaaagactgcactcccgaaagacatacaaaacatcatagctttctggaacaaaatataaactttgaaacttttgatctacagagagacaacttatattccccatccagactcactaggaatggcttatttgaatgaaaaggcagtagaagaggcagataagtaaatagaaataataaacacataaaatgatacaataaaagattactcttactagcaatcaaagaatgacaagttgatgaaaacatagacaccattttatgcctattcagttgacactattcaatgttttcaatgtcagcagtggagatgaatgaatcctcacccaccttgctgctggccttgaaattagtatatgtattactgatggccacgctttatgtacccaaaacactaaagatatatttgaagcaatcacctcatttacagagccttttccaacaggaatacttcaatgaaaggactcttactgaaacaaatttttttttttttgagacagtgtcttgctctgtcacccaggctgtagtgcagtggggagatctcggctcactgcaacctccgcctcccgggctcaagcaattctcctgcctcagcttcccaagtagctgggattataggcatgcaccaccatgctcgagtaatttttgtatttatagtaaagacagggtttcaccatgttggcaaggctggtcttgaactcctgacctcaggcgatctgcctgcctcagcctcccaaagtgctgggattacaagagtgagccactgcacctggccacaaaatttttgattggcgtcattagttataaaaagcaggaatggaaaccacatgagtgtccaacaagatctcatggttttacaattttttttttttttttctgacgcagggccttgcactgtcatccaggctggagttaagtggcatgatcatgactcactgcagcctcaacctcctgggcttcagtgatcctcccacctcagcctcccaagtagctgggaccacaggcaaatgacaccacaactggctaatattttgagaaaatttttgtaaagacgaggtttcactacattgcccaggctgatcccaaactcctggcctcaagcaatcctcccacctcaacctcccaaggtgttgggatgatatgcatgagccaccacgcctgacctaaacatttttatgttttagtatagctattaaaaataacagctatttttaataacactatcagatgaaacgtaggaaatgttttacagtattaaccgtgggggtgaggcagaaatcagaattgtgttctataactgcagctttgtaaataatatgattgtttttagaactaacatttgcactgaaagatacataattctctgtgtgtttttccttccaaaataatctgcaattaataatagctatccactccctatatccaaacactgctgagcaattgctcatatactgggtacatttcatgcaatttttacagcacacacaaaaggaagggcttatcctcattttgtgggcttgaagaggttaggtggcatacttctccagggtcacatattgaggtttcaaccaggtctgtttgtccccaaatctcttacgatttgtcctggtgctgttcaaagggggagaaaagttggatcaggccattaggattatgcccactgatgcttacttttttttttttttttttttttttgagacagagtctcactctgtctcccaggctggagtgcagtggtgtgatctctgctcactacaacctccgcctccctggttcaggcaattctctcctgcctcagcctcctgagtagctggaattacaggtctatgtcaccaagcccagctaatttttgtatttttagtagagacagggttttaccatattggccagcctggtctcaaactcctgacctcaagtgttgcacctgccttgacctcccaaagtgctaggattgtaggtgtgagccaccactgtgcccagccactgatactttcttaatatcattctgtctctttgcaaatgattacaaaaacaaaaatggtagcatggaagtgggttcatggaatccactgtgcatggtgcatggaagtgagctcagaagggatggtttgcatgtcaaggcagaagagttgaaacttgccacattttgtcccttgtattatacctttctggtgtgttagtaaacagaagattccatctccctcctaaggatggtgagctgcatgaaatgtagtctgggtccaccatttcctccaagagcccttgctgatcctcagcaaagatccccaaccattacttagcactaaggacaatggaccttgagtgccttggagaggggccagagacaaagatagcttgaaaagtcagtggcccaggccgggcgtggtggctcatacctgtaatcccagcactttgggaagccgaggtgggtggatcacctaaggtcaggagttcaagaccagcctggccaacatggtgaaaccccatctctactaaaaatacaaaaattagccaggcgtggtggcaggcacctgcaatcccagctacttgggaggctaaggcaggagaattgcttgaacccgggaggtggaggttgcagtgagctgagaccccaccactgcactccagtctgggtgacaagagcaaaactctatctcaaaaaaaaaaaaaaaagagaaagaaagaaaagtcagtggctctccttagtgatctgtatccaaagctgtggcttcagctgcaaatacaaacagatgctcttaaaattcccacatggctccttttcatttgtaaatctgtctcaaatttccaaatatttatatgtaaacatgttccaaagcttaaacagacactaaggtgattggcacattaagtatgattagggcacttacttggtatcttttctagatactatcatggtttcctgaacatctaagactggtcgacagagccttacctctcattccatctgaaggttaacacctttacaaattctgggtctgagatatttaatcactgtctcttatgctgtatttcaagtcagcttagagtactcaacttagattacaaactcttccaaggcagcagagttcatatcctaagttttggaccaagattctactgcaaacatatggttaatattttataggtcccttggaaatacttgcatttggcttgaaatatctacagagcttcctaccaacagtcagcaattctatctgttctggctttcagagtttgaacaggtcaaatataaggagtgtgtccaagcttctcctacaaatctgatcagtttaagcacccatggtaagacttctgatgtaaggcttctgaaactccccatgttttcctaggatgatggtggcgtgcgtttacagagagctaactatgtgttctatgcatcaggctctccactatgtattcgcattagcttactttgtttgaggatcaaattattatccccattctacaaataaagaaactgtaactgagaggttaagttctttgcccaaggacatataaggggtaaccagaataaaatcccttggagacatgctgccacaagccaaggaacttccagaaactaggagagaatcctgaaacagatccttccccagcaccctcacagggaagatggccgtgcaaaaccttgatcttgaacttctggcttccagatttgtgagacaataagcttctgttctttaagctgctctgtgtgtggtaccttgttacagcagccccagctaactaatatatggcttgaatgtgtagctttaacatcggagagggcctttcaaattccttaattccaacaaacagaggactccacagtcaggtactgcaaatttgttacttaatgtctttaaattctgaatccacctttgccaagactatgtgcacaaaaggaaaaactgtggttaccttttgtaacaagttatataaataagaactaaatgaccatgttttcttttctctcttctaattacccaaaggttaacatgctattttaaagtttaatttaatttaattttgcagcttacccaggtttaacagttatttgcagagaataatcagaaggaactgcaactggtgtttaatgcaaataaggccaggctgctgaactagggatgactcatgcaggccttgtgcaaacatctagtctgatttgcatttaagagaaaaggtacacctatagaagtatccaacatgtattaaaacatcttcaaaatgttttggagttttaaagaagtgcccattaaagatgctttctgctccacctcttaaaaaaagcatggccccaggaaaaatgataatgtattctagaacttttttctgctgtgatattttctcctcccaatcaatgtttgcttcccctttaaaatctctgtgtactttcatgggtgcagtagcacatggtgatgagggcttgggtttgattgagcaatgctcaccccatctccagcccctaccccacaaaggcaagtagtacagagaatatatatacttatgattctgacataaaataaaatgtaaagccaatcaaaatgtttgcatattttttgcttttccacattccccttctccatagacctagacttcaatcaacctgcatctcctataaagagaaaatgactctcttgaatgcaactggactccaatgaaaacaatcctctttaactctcttgttatcataatactatttataacttttactcaattaatgttattataagctcttatatattcaacatgttaccaacctgaaaacttacccccgaattaacctgatttaggtgaagacaccctatagaactctgagttgagtcaggaagattgatccattatttaggaaacagagctcactgtcattgtcccctgtaggtctagggaggaagcaggctctggctgaattgtctagaggattctctcccttccagcaaccaatctccttcccaccccatctccactcttgtgagcaaaccttcagctgtccatcaataaatcatgccagggataaattcccaacaatagcaaatctaactggcctcaacttgctattttaacactttgatcctaacttccgagagctctttttaaaaagaaaggaaaaaaatggaattagtgtaagaatagagagaagagcattaaggataaactaggggtttagtgccgggtgcagtggctcacacctgtaatcccagcactttgggaggccaagtttggtggatcacttgaggtcaggaatttgagaccagcctggccaacatcatgaatccccgtctctaccaagaatatgaaaattatccaggcatggtggcgtgagcctgtaatcccagctactcagaaggctgaagtacaaaaatcgcttgaacctgggaggtggaggttgcagtgagccgagactgtgccactgcactttagcctgggcaacagagtgagattccatctcaaaaaaagaaaaagaataaactaggggtttaaatagtccctaaatcagcaatcagaaataaatcaagagtacctgcacactgcacaactcaaagaaaattactgaaaagcctttaaatgtcacatggatttgaactttactattagatatctggagctaattaaaatattttcaaagcatgttttaaaagtgctctgaatagactgtgctctggatttacatgatgccatcctttcaaatatttcggagttgtgacataggctcttctacaatattcatcaatgaaaaactgagctacactcaagagcaaaagctggtgtttgggccacaaaacggtcacctccaagtgctccgcagctaggcctgccttatatatcagttcctaggctcattctggctattgccctacccatcctcagagtccaacctactcttttcctccttcatcttaacagacgtgtctacagtgaatttgtgtcttagttttccaaagcttaaacctcaggtacagaaaacaatgttgcactaaccatgacagctaactttgtgcatgtttgcatgtgtcacatgagtatttaaatattatcaatgtttggctgggcacggtggctcatgcctgtaatctgaacactttgggaggccaaggcgggtggatcgcttgagaccaggacttcgagaccagcctggccaacatggtgaaactctgtctctagtaaaaatacagaaaattagccgggcgtggtggcgcacacctgctataatcccagccacttgggattccgaggcacaagaattgcttgagcccaggaggcagaggttgcagtgaggagagactgtgccactggaccccagcctgggtaacagagcaagactatctcaaaaaataaaatagaataagaaaataaatcttatcaatgcttgttatggcttaaacattagtaatttaggctatcaataaggaatgttgggctaggcttgtggctcacacctgtaacccagtactttgggaggctgaggcaggaggatcacatgagctcaggagaccaggctgggcagtatggtgaaaccacagctgtacaaaatatatatatatatactaaatttagcagggcatggtggtgtagctgtagtcccagttacttgggcagctgagggaggagtatcacttgatcctgagaggcagaggttgcagtaagccaagatgctgtcttgaaaaaaaaaaaaagggaatttattttgctgtctggaccaaacacaaaatacaattacactcaccatactctgaaatcagaatcaatgactctcaagaaacagcttccataggtcaaatggggatctacaaggcttccagattatcttcaaaatctgttgatagacatttctgttgtgcttcattatagaaattactagattttcacatatgcgttagaacttggagaggctctatctgctctgactgtgcccattgcaggccccaccctagctccagccaccttctgctccctcacaagtacactcacaagggcagctaggcagcttcattccttttccaggtcctcaaatcccgatgtaatgtctttatcatttgtactttaacaacttactgcctgaaccattctttgcattatggcttgtattgtggttgtttttgtttctaacagagtaaaaatccaaaggtgcaggcaaggcatggtggctcatgcctataatcccagcactttggagggccgaggtgggcagattgcttgagctcaggagttcaagaccagcctgggcaacatggcgaaaccctatctctacaaaaaaatacaaaaattagctgggaattatggtgcgtgcctgtggtcccagctacttgagaggctgaggtgggaggatcgtttgagcccaggaagcagaggttgcagtgagccatgactgcaccacggcactccagcctgggcaatagagtgagaccctgtctcaaataataataataataatgataataataataataataaatgataatctaaaggtgcaagatcatggcctattcctcttatttctcaagtggggcagaatcaagaaatggttaagggctcctgtctgaggttagacagataggggatgaaatcccagctctaaggcctgctacctgcagaagcttgggaaaaatattcttagtaagctcctacttctccatttataacatgaagataatggttaccttacagggtccttgtgaagcttaatcttgatcccatgtaaagcccttagtagcatgcacagtatgtggccccagatatccactgagtgaggcattccagtgattcatttcatcagaaattcagtaacacacacagatataattcttatatttcccccttcgataaagcttagtttagtttattattaaccatcgtaaacctgaaacatcagggaactgaagttttcaagtgaaaaacagagtaggaaaacaataaaaacttttataattgcacttcacagcttgcaaaagcttttcagataccattaacatacttatctctaaaacatcattgaaaagtagattattttcattttattctctgcaatagctccattgcccagaacagcatgtaacacacagtagaactttcataaagaactaccaaatgtagaatcaagctcagagttcaaggctgtatccaggttctcagaaatgacaagatgtagaggaaccagaaccagatcttagcatttgaatccaaatcctgcatcctttctcctcaatcacactgtctccggcccccagggtaaggttccacagaactgtaattatttaagacattctatattttctagatgacaataacttcaagataagagagtagagtgcttaaaaaaccccgattaaagaaaaaaaagatctctcttgtgtcaacaagggaagagagaaccagtaatataactacttggatacagatttttgctttcctcaaagtatactcagcaaaccaccttgatcatggtatgaacaagtgaaacaaaccacatttcaaaaccaggttgaatgaaaagatgcattggctgagcttacttggaaataatatggaaagagaggaagtggacagatctatagataaaaacaacattggccttggccatgaacaagggggttcattttactatttctacatgtgtttgaaatctttctaaattaaaacaaggcaacaacaacacaacaaaaactctccttcacataaaccaatgtattaacatgaggtcaccactgtgtaaagcacatgtgtactaatcaccaacacaggctctgaagggaacacatgctttatgcagccattggctccatcttgaaaactcagatattaaataatcttttcatagacagttaagaggagattattttaaaaaatgaaatacaggccgggcacagtggctcacgcctgtaatcccagcgctttgggaggctgaggcgggcagatcacctaaggtcaggagttcatgaccagcctggtcaacatggtgaaaccccatctctactaaaaatacaaaaattagctgggcttggtggtgcacttctgtagtcccagctacttgggaggctgaggcaggagaattgcttgaacctgggaggcggaggttgcagtgagctgagatcatgccactacataccaccctgggctacagacagaacaagactctgtctcaaaaaaaaaaaaaaaaagaaagaaagaaaagaaaaaaaaaaagatacatctgaatatttaataaagtgaaaatgttatagaaaactataatgttttatgagtcagggccactccatttgcattggacttgaggaggcatatttcttctttggttaaacaggaatatttagcatttacttgttctttttgtgcattacaatttttttcttttaagaatcagtttcagcctggcacaggggctcatgcctgtaatcctagcactttgggagcctgaggcaggtggatcatttgaagtcaagagttcgagaccagtctggtcaacgtggtaaaaccccgtctctactaaaaatacaaaacttagccaggcatggtggcacatgcctgtaatcccagctactcaggaggctgaggcaggagaattgcttgaacctgggaggcggaggttgcagtatgccaagatcacaccactgcactccagcttgggtgacagagtgagactctgtctaacaaaaaaatatatatatatatatattatgaagtaatattgctgttcctcagtttatcatctgtaaaatgagtaaaaacaatagcagctgccttttacagctgctgtgaggataaaatgattcaatatatggaaagctctggaatagggcttgacccaaaggaaggctcagtaaatattagctgttgtttttcttatgtgagataattaaatactaggagaagaaacacatcaccaaattgacacttcagggacagctgagaagttactacagcccacgccggggctcaaatttactttcgtgtgttgaatcattaatagcaagggaaatacctaactcgtaacctactgtctcaggccacaggaaaatgtcaccctagtagtgagagagatattaaatattttactctaccagctgctcagagcaaagcagcctggggtgtatccattactgcctttttcagatctcctgaaagatgtcacaaaccccaaactctggaatttagaatataatatgaacaaggcaacttagagttggtatctttgcatagtgagtaaatgtggaatttttcagaatgataaagtggttttgtttatggtgtttgtttttttaagaaatagaaattgtctttacatctgacacctctgccacaatatccagtgtatatcttgccaataagagacacattacaccagccagcctaaaatagtctcaggttgtttaccaacaatgtgtaattgtgcattggagaacccggggctgaaagtattcatatattcatgttacactcccatcagatttgccttattaaatggttctaatgctagcatcctacataaatggcaaaattcatgcattatataataacatcaacatttgggaagggaaagattataacagacactgaatctcttaattttttctctaccaagataaaaaaaaaaaatcctggacatgtgcttgcttcggcagcacatatactaaaattggaatgatatagagaagattagcatggcctttgcacaaggatgacacacaaattcatgaagcattccatttgtaaaaattaaaaaaaaaattaaaagccttgataaaatgtcctgcggatttgacagtttcacattgacgcttaatcaagttaattcttgattatttgtgtgtttactgactgatgtagttattatccatgaatcccaggctctggtcagctgcctggcttcacataagtttacacaggcaaactcccaaagggagcttttaacttttaactgtttaaaaagcggttagaggtgatcaatattctaattgtttccaggccttgaaaacagagaatcctatattctctcctgttctctacagagtcacagcagtgcaattccaattcaatccaatccccagccataacataattaacggcgcagcactgccagggacagacagatgaagagggcttgcacgcgcccagacaccaggctcactgctgaaccatttgagcttaagttacatatagttcattatccccctttacccctaaatacttcaggggtagtctctcacattctcttacataaccatagtagaattatcaacttcagacaatttaacattaacattcacagttatctaatagtctgatttcgtcattgacccaatgatgtcagttatagtattatttttcctctagcacaggatccagtctagaatcaggtgttactttaggtagccatgtcctttaatctgaaacatttccacaacatatatatatatatatatacacacacacacacacacacacacacatatatacacacacacatatatatatatgaaatatttacacaacatatatatgtgtgtgtgtatgtatatatatatatatttgagactgagtttatctctgtcacccaggctggagtgcagtggcatggtcttggcttactgcaacctccgcctcccgggttcaagcgattcttgtgcttcagcctcccaagtagctgggattacaggcgcctgccaccatgcccagctaatttttatatttttagtagagacacggttttaccatgttggccaggctggtctcgaactcctgacctcaggtgatctgcccaccttggcctcccaaagtgagattacaggcgtgagccactgtgcccggcctccacaacctgtatttgtcatttacaacactgacattaaaagaatatggtattccttctctctctctctctctctttttaaaactgaacctcccacttttgggctttctctgtcatttcctcgtgatttaattcaaggtctctgttcttgctggaacatcacataggtgatgctgcgtcctttcagatgtgacatctggaggcacgtgaggtctctgccccttgtcggtgattgcattttgattttatactttggtcatgtggtcaacgtgttgtttgatttctccactgtatgtattttttgaacttgtaatttgtggggagacacttttaagacatcgcaaatgtcccgttccttatcacaatttcctcctaaacgtgacactcatggatgattctcccctgatccagtctctactacaatggccatgaaaggatgatttcacagcacccatcccctccacgcatattggtgagcctgagcatgccgctgtaagcatagcctccctactttccacttattagttagtaatcaatatggatgtgtaaattcctattttttctccaatggcatataattccttactgtccataattattttggtgtccacatggtccctggtttggccaatcaaagcactttcaagctagcactgtgtccttgtgacaggctcccatcattctttcagcatgtccataccttgtgacaataacaagatgttccaggctcaagttgtacctctcctgccccagcctgtaatcagccatttctcccagtacccctggttcctttgaatgggaaatgataatagagaccaagatcttggcacttgatgtgcttgttactagcggggtgactttgcttcttggtcctggtcctttgatggatagagctaagtaaaaaatgtatacacacacacacatacatatacacttatgcacacacgcatgtacatgggaatacttatacatgcatgtatttcagaaatcagttcatacctattcttctgattccaattgattcccacaatgttcttttcccccatctcccatttcctttctatatgttccttctttctcagtgagaaccctggctctccaaaacaataactcatttgctcaatgctaaaatacatctaaaactgtttcagagttgctttgccagtatcactacataaagtatatcgtaagagtttaaaatttctttgcgagtttccctcaccacccaactttagacaagatggagcatatctcatagaatactgtgttcgtagctccctggattatttctttttctcccctcttcactgtggttatggaattcatttgaaatacaactgggtttcttcatttcatgttgctctcagttttaggatttcccctatccctattatatatatacttatatttaaatataacttaaaaaaatagggatgggggtctcaccgtgtagctcagactggtcttaggcgggaggatcatttggtcctcagctcaaacgatcctcccacctcagtctcccgaagtgctgagattataagcatgagccaccaagtctggccccatccttgatttaaatttatttttgaatatgtaggacattaacaggctccccaaagccaaaactatgcaaaagggtgtcttagacaagtaaccctcctcacatatccccttctccttgttcccacccaccctttgttggtaatcgactttactgttttctgtttatccgtcctgtgtgttttacaaagataagaagataggccaggcgcggtgcctcacgcctgtaatcctagcactttgggaggctgaggcgggtggatcacctgaggtcaggagttcgagaccagcctgaccaacatggagaaaccccgtctctactaaaaaaaaaaaaatacaaaattagccaggcacagtggtgcatgcctgtaatcccagctacttgggaggctgaggcaggagaattgcttgaactcgggaggcagaggttgtggtgagccaagatcgtgctattgcactccagcctgggcaacaagagcaaaactctgtctcaaaaaaaaaaaaaaaaaaaaagatagttgtatttttccttatgtttccttttttcttttacaaaagtagaaaatatatgttcttttgcacttagcttttttcacttagcaatatctcctataatcactagaagtcacttctcaggcaactgtttgcaagtagagaaatatttatgtcttatgtctatgtataaatcattttcctggaaaacttaaaagaaatccataggccgggcatggtagctcacgcctgtaatcccagcactttgggaggttgaggcgggaggatcacaaggtcaagagatcaagactatcctggccaacatggtgaaaccccatctctactaaaaatacaaaaattatccgggcgtggtggcacgcccctgtagtcccagctacttgggaggctgaggcaggagaatcgcttgaacccgggaggtggaggttgcaatgagctgagattgtgccactgcactccagcctgggcgacagaacgagattccatctcaaaaaaaaaaaaaaaaaaaaaaaaaaagaaatccatagatcccacgatggcttgcttccctttctttctctgttttccaagacagaagtcctcatctaccaccctaggtccttaaagtctagctttcctttaaagactcaactttaacctaagggtagcatattactgcagtgaatttatcaacctctaggcgagatatttacaactccagggaccttccctaagcaaaatttcaatctaaggtgatagctccaatagcagcaaccaagtaaatattcattgagaatttttaaaaaatcaccttgtgaacctttaatccctaacagataatctggtaactcatggcaagtggtcatcaaagaaaccaggaagggccgggcacggtggctcacgcctgtaatcccagcacttcgggaggctgaggcgggcggatcacgaggtcaggagatggagatcatcctggctaacacaatgaaaccccatctctactaaaaataaaaaaaaaagaattagccgggcttggtggcgggcgcctgtagtcccagctactctactcgggaggctgaggcaggagaacggcatgaacccgggaggcggagctttcggtgagcaaaaattgcgccactgcactccagcctgggagacagagcgagactccgtctcgggaaagaaaaaaaaaaaaaaaggtatttggatgactcagaataggccaccatcgctgttgggaaactcctagtcctgccctgtgcaaaccaactgcagcttaattgtctctgactggcaattgctaccaccctcctaccattcccatcatgtaggagagctgctaggaggtccactcactttgtcactagcacccaaattcaaaggcactagaaagaagctatcactccaaaccctctacataccagcaagaaggaggttggtgctgcagtacctggatattccaaattggccaatctctcccaatctctccaatatacaaagatcggggggaaaaaatgactaaaaattatcctcccacatagtgattttaattcccggtagaaatgtaagtggaaggaagccaaagatgaattcagtacaataatatcatgattaacaaagtcttgggatgaacatttcatcaacacaatcactctgggataatgcctgggtggatgagatacttgagtagcttctgcttctacatgtcctagaaccagcagagggaaagggcctgtccctaagacccctccagctgggaacagagcctgcagccccagagatgcctgaggaaccccctctgtggccagcctatctccaccttcgtctttgctcttccaccttccccaaactgaacatggtttgttttaagggaaagagcagctagtggcttccacaagatccagcccaaaagtaatgcacattctggcacttaacccgaatctcctgcaacctcttctcatcttcatgaagcttctgacaaggaaatgtggctatactatatcctcctctttgttcaccaaggtaataaggaagatactttttatttttttatttaagatggagttggccgggcgcagtggctcacgcccataatcccagcaccttgggaggccgaggtgggtggatcatgaggtcaggagctggagaccagcctgactaccatggtgaaaccccgtctctactaaaaatacaaaaattagccaggcatgatggcgcgcacctgtagtcccagctactccagaggctgaggcaggagaatcgcttgaacccaggaggcagaggttgcagtgagccgagatcgcaccaccgccctccagcctgggcaacagagcgagactctgtctcaaataaaataaaataaaataaaataacataaaataacataaaataaaataaataaaataaaataacataaaataacataaaataaaataaataaaataaaataaaataaaaaataaaataaaatataaaataaaataaaataaaataaaataaaataaaataaagaagccctgaactcatagcctcaagcaatccttccaccttggcctcccaaagtgctgggattataggcgtgagccattgcacccagactgtgttgttgttgctatcagggcaactgtgatatttatcttaagaaagttttagattcaaatgcagtggcctctctgaagattcttgagataagacaaagagtgggagagaactattctctactctagcatggcaccacgagcagtacggccttagcaagtcacatcctcacctgggctcaggttatcatctgtcagtgagggttcttgaccagatcaatgattctaagatgtggccacacatcagaatcccacagtgtgcttttaacagcaatagtttgttgaacctgaacccaatctactgaacctggaatggggaacaggtaaagtctgtccctgcatttctccagaagatggctgaggtcctttctggcactaaatctcctaattctataggtttttttcttttcctatttttttttttaatggactaggccaggtacagtggctcacgtctgtaatcccagcactttgggaggctgaggcgggcggatcacaaggtcaaaagattgagacctttctggccaacatggtgaaaccccatctctaaaaatacaaaaattagctgggcatggtggtacacacctgtagtccaagctgctcgggaggctgaggcaggaaaatcacttgaacctgggaggtggaggttgcagtgagccgagattgcgccactgcactccagcctggtgacagagcaagactgttaaaaaaaaaaaaaaaaaaaaaaaggattattactgaatagttttaggtttacggaaaaatggagtggcaatccccacatatcctttcagccccgtgccttagtgtacgctgttcacatcttgcattagagtggcacatttgttacaactgatgagccaataatgagatacacacacacacacatatatatatatatattttttttttcttttgagacagggtctcactctgttacccaggctgtagtgcagtaatgtgatctcggctcactgcaacccccatttcccaggttcaagcgattctcctgcctcagcctcctgagtaactgggactacaggtgcccgccaacacgcctggctaatttttgtattttcagtagagacagggtttcaccatgttggccaggctggtcttgaactcctgacctcaagtgatctgcccgcgtcagccccccgaagtgctgagattacaggtgtgagccaatgtgcccggccccagtaatgacatattgtaactaaagtccctagtttacatgaagtccacagttcactagggttcactctttgttgtgtggggtttggcaaatgtatagtgacacacatggtacctagttgaaagaatgccctcttgcattaagtcttactctcaagagtggaacacacagtaaaggcagaagaggagagcaataggctgcttatatcccgtgatcctcaagtgatgacaaatcgaagatatttacagtgaacagtggtgcatgtgcccagcaccataaacatgaacctacttacttttttgctttttcattgttcctttttaacacttggaatatctttcctacagcaatactctctgttacttaaactaccaaacccattatctcctgatgaagcaatgtgcttcccaaacgtagtaattcaaggctgtgtctttacagccttgaacaatcttttaaaaatctgagacatagcaaccagatgttgatagagattacttctcttgatccaaagataactggcacttggagttctaagaaagtcaggagttcaaagaatgagaatctaagtgagggaaaatgaactccttgaacacacgttttttgcactgttatcaagtcatttcttaggattgattgtcagaatgaaatggttgttaaaaaattgtactctaggccgggcgcggtggctcatgcctgtaatcccagcactttgggaagccgaagcgggcagatcacctgaggtcaaggttcgagaccagcctgaccaacatggagaggccctgtctctactaaaaatacaaaatcagccgggcttggtggcacgtgcctataatcccagctactagggaggctaaggcaggagattcgcttgaacctgggaggcggagattgcggtgagccgagatcgtgccacagcactccagcctgggcaagaagagcgaaaccccatctcaaaagaaaaaaaaaaaattgtactctaaagatagagctctgtttccacaaattgtatcagaaacgagaggtaacatttcaacatttaagctttcatatgcatttatttttcaaattccaacaaacattttcaagtttgttagaactaaacagaacctactagaatcaattctattgatgtcatttcttttaacatagcaacttatcacacaataagtactcaatgtctgggttttaattgaccaagtaagtaaattgaagaaagtttggaaaactttctcttcctctgacacaattcttcactgttcttttttttggggggcggggggatgaagctttgaaaaatttatttttgcataacataaacatgtcaatctttccctttagctccttccactcctccttcagtgtgccgaagagatactgagttcttccagatttttgcttagctgggtagtttctaaactcaacagactctccaggtaggtagttcctgcacggggctttcctgtcactggatctatgacttttccaactttgaaaatgatcttggcctgttcatgtttcacatgcttcgttcatgggacaggtaaagctctgagaagcacgatatccccagctgtgcactgccgaaggccatcgtgaacaaaggaggttttccacttattataatactttaataaatagggatccagaacaagcccggtcactctcgctttagcagtcttttgtatttttgtcccaatcaccttccccacgatccatctggcatggacagatgaacgaacgacggacatgatgtggctttggtcacctccgccatgactgtgcagccacctgccccagggagcctgccttccttccttccttctttccttccttccttccttctttctttcttcttttcttccttccttctttctttctttctttttctttctttctttctttttctttctttctctccctctttctttctttctttctctttttctctctttctctctttctttctttctctctttctctctttctttctttctttcataccgagtcttgctctgtagcccaggctggagtgcagtggtgtgatctcggctcactgcaacctctgcctcctgggttcaagtgtttctcctgcctcagcctcctcagtagctgtgattacaagctcctgccaccacacccggctaatttttgtatttttagtagagatggggttttaccatgttaggcaggctggtctcaaactcctggcctcaagtgatccacctgcctcagcctcccaaaatgctaggattacaggtgtgagacactgtgcccagcctgacactattcttgaattaacttttcactttcagttgtcaaaaaaaaaaaaaaaaaaaaaaacagaaaataagtgttggtgaggctgcagaggagttgaaacacttttgcactgccagtgggaatataaaacggtgtagccactgtggaaaacagcataatggttcctcaaaaaataaacatagaattaccataggatctagcaatctcacttctgggtatatacccaaaagaattgaaggcaggaatccgagcagatatttatacagtagacccatgttcacaacagtgatattcacaaaagcaaagaggtagaaacaatccaaatgctatctgataactggatacacaaaatgtggtatagagacaaggaactatcatttggccttaaaaaggaaatcctggcacatgcataaagacatgctaagtaaaataaaccagtcacagaaggacacatgatgtatgatttcacttacattaggaatgcagagtaggcaaattcagagacagaaagcaggatgatggttgccaaaggttgggaggaaggggagttgtttaatgagtgcagagcttcagttggagaagaacttctggaggtggatggcggtgatggctgcacaaccatgtgaatgcccttaaagacactgaagtgtataattaaaaatggttgggtcgggtgcagtggctcatgcctttaatcccagcactttgggaggtcaaggcaggcggatcacaaggtcaggagttcgagaccagcctggtcaatatggtgaaaccgcgtctctactaaaaatacaaaaaattagccagacatagtggcgggcacctgtagtcccagctacttaggaggttaaggcaggaaaattgcttgaacccaggaggtggaggttgcagtaagccaagatcgcgccactgcactctagcctgggtgacagagtgagactctgtctcaaaagaaaaaaaaaaaaaaaggttaaggtcaagcgcattggctcacacctgtaatccgagcactttgggaagctgactggatcatctgagggcaggagttagagaccagtctggccaacatggtgaaaccccgtctttactaaaaatacaaaaattagccgggcatggtggcaggtgcctgtaatctcagctactcaggaggctgaggcaggagaatcgctcgaaccccggaggcagaggttgcagtgagctgagatcatgctattgcactccagctggggcaacaaagcaagactctgtctcaaaaagaaaaaaaaaaatgttaagatggtagattgtatgttgtgtatattttatcacaataatttttttttcttttcttttctttttttgagacagagttttgctcttgttgcccaggctggagtgcaatggtgccatcttggctcactgcaacctctgcctcccagattcaagtgattctcctgcctcagcctcccaagtagctgggattacaggtgcctgccaccacgcctggctgattttttgtatttttagtaaagacacggtttcaccatattggccaggctggtctcgaactcctgacctcaggtgatccacaggcaggagccaccgagcccagataacaataaattttttttaagtactcagttgttctttatctcctttggagaaaggagaagagatttaaactgatttcaactaaaaaatttcctgatcagacaagttgccaaaagaataactggaatttcttctctgactgtgtttctcaagtatctagccaggcagtgtgctaaaagctagggacagtgggaaaccaaaaatcacacatcctaccttaatggggctaagagttcagcccaatggctctgaaactttagcacatatgaaaatcctctggtgggcttgttgagcacaaattgctagcacctacactcaggatttctgactcagggggactgggctggggtccaagactcttcatttccatcaagctcccgggtgatgccagtgctgccggtacagggaccaccctttaagaagctctagggcaggaggagggacttgtaggtaaagaagcagtttcaatcaagtgtgctgtgatgggaatccacccagtatacatactaggtaatgcatccacctgtcctaggagaggtcaagaaagcctttcctagaggaggtgttgcagaaattgaggtctaacctgagacctacaggacatgtaggagtcagacaggtgcatgaaagggacagagcatttcaggtggagagtgtccgatttgcacaggtctagaggtaagaacagcctgttcttgaaattgcaaatctttccatgtcatgggcagtcagagagtgatggggaaagtaatgaataaggaagagagaggtgaggtctatcaaaaaggacgttggaatcctacagtttatccacaggataaaaggaagccaacctcaggcaggcttgcagcattcaagaattgaagctctaagaactaaggtgagctcatcagctccgggagaaggcataggtccagtagagtcgcagactaagcaggtggggaagggggcagttgtacatgcccctctaattctcgcatcatctcacacaacccaagctccatttcctcagaaagccttctgctgctcaggtaagaaaaacccaaggccattgtgccatccagtacagtggccacgagccatgtgtggctattaaattagctaaaattagaagccagatcagcagttgcactagcctcatttcaagtgttcaacagccacctgtgactaggggctagaaacaggaacgcttttgggccaggctcggtggctcatgcctgtaatgccagcacttggggagggcgaggtgggtggatcacctaaggtcaggagttcgagaccagcctcgctaacatggtgaaaccttgtttctactaaaataacaaaaaattaaccaggcttggtggtgcgcgcctgtaatctcagctactcaggaggctgaggcaggagaatcgcttgaacccaggaggcagaggttgcagtgagccaagatcgtgccattgcactccagcttgggcaacgagagcaaaactccatctaaaaaaaaaaaaagcagaacactttcatcatcccagaaagttccctaagccagcactggtccaggaaatgaagtataagcaggattagatctaagacttgccaggcattttggttttactgcctgaagccagcaagcaactggtttgggtcttcactcatgaaaacacacacacatacaaatatatacacagagagctctaaattgatttttaaaaaatctatagggtataaagcaagacaattaacaattatacattatatacagtctacaaatatcctagatatcacttttataatgagatataaggaattctggctgggagcagtggctcacgcctgtaatcccagcattttgggaggctgaggcaggcagatcacctgcagtcaggagttcgagaccagccttgccaacatagtgaaaccccatctctactaagagatacaaaaattagccaggtgtggtggggggcacctgtagtcccagctactggggaggctgaggcaggaaaattgcttgaacccaggaggcggaggttgcagtgagcaaagatcatgccactgtactccagcctgggcaacagagtgagaccctgtctcaaaaaaaaaaaaaaaaaaaaaaaagaaaagaaaagaaaagaaaaaaaagaattttcttaagctactaagaagaatcctagaatcatacctattctccaaagccatctgtaaatcctaaaaataaccagtcaagggaattgagggaggaaaacatagtccagattagaattctaaaaggccatttttactgtttacatgccaaaaaaaaaaaaaaaaagctaagcttttaaagctttctctattgtgtattttaccaaagtcagtatgaaggattcaaaatattacatagctaatccttactccaagttctaaaaataaaatgcaagagacggttgcatgccaagttggtaacaaatccctatgccaaggatagaagtggaaattgatgcaaggaggaaatgagttatgctgtaaaatgaaacacacacccaagagaaaggcttaacccttgggctgaccatagcagcaaacactgtaaccagttaaaaagtccaagaagccagaggtagatgataattctacaaattcagagatgttcttgttttcccagctgctccacaaggactttaccagcctagataaacagagcccgccttccactttccatgaaggatcaggtgggcagcttcccagtgagtaaggtgggtggctgagtatccttatcttgatggtgagtgacaggtggctttgggaagtgtactcagacaggacagcttccttgctcaaccgtggtctgacccaggcatattaaggggaggaccagctcagaaagaaagcagagccaagtgtatgcattgcgcaaaacctctgatggccaggaaggcctggccgccattccctagagccacgcattctgcctgccccacgactcttccatcctcagagccgtatttcctcctgggcctgccctgccagatctgattggctcccttctccctgctctgctattaaatgccttccttgggttcaaataaagctagtttctctagagcctttctaggtatgcccgtgcgccttcccactccaaacccactgtgaatggaagaccattcattcaccaattcctcatttagttaaaaatcaagacccaccagcaagaaactcagtgcaaggctccttggaggtgctggggtaaagcaagaaactgctagtacttcattaagccagtaggcaactggtttgagccttaattcatgaaaacacacacacttcactctaaattgatttttaaaatatcataaatgccatcggactatctcaaatggcaagaaacggccaaagatgactccagagtagataattgaaatggatgtggggaaagtaagctcattcaggagcactgagcctggggcatcccaaatgcacagcaaatagtagatctgatcgaagaacttttatttgtaattctgatttcataatgtattaatgatagcaccagctagcatttattgagccaatgctatgtgtcaagtaccataccaaacatttaacacacacaaatgcatttaaatatacaaggatccaataaggtaggtcctgttattccccttgtataaatgaagacactgaggtcaagaaacttgtccatggtctcacaagtgtgcggtagagtccagattaaaacccagccagcccagcatcctgctcataaaaccctcatgctgagaactgctgaactgcatttttttttttttttttttgagacagagtctcactctctcactcaggctgaagtgcagtggtgcgatctcagctcactgcaacctctgcctcccaggttcaagcgattctcctgcctcagcctcctgagtagctgggactacaggtgcatgccaccatgcccagctaatgagaactgctttttcttgcactcaggcagaagtgcctcagcctagcaagcttccctaggtgcccacccaccccagctgccaatgggaaccgcagtccaatatttcacatttcggttagatgtctcaaaatttgtttagcactttccagagcagtccacaaaatgccacttgccttgacaggcctgtgttctatatgcaatggcaccacagaatttagttaccatccactttgcctccatccagtttgggatcttcctcactccgtgagacacaaggctcctttctcctgcctccagccggcccaccctcagaacagggtacccctggagccaaattgttgaggcaggagctccagatgggtagaaatgggatagaggagaaggagaggctgagacagggactttgagatgcactgcaagccagccagtggggaggctaccccttgggggcaaaccacacgcaggggacaggtatactggggcttgcctactgcggcagatcgcaagttcatggcaatatacctgtaggtgaaaacatgtcaacatgccccaatgttaaggacagaacagcaaagggacagtcagatacgagttaaagtcaccgttcttctagaaacatggatgtgaattttgtttgttttgttctgtaacagagtctcgctctgtcgcccaggctggagtgcagtggcacgatctcggctcactgcaacttctgcctcctaggttcaagcgattctcctgcctcagcttcctgatagctgggattacaggcacgtgccaccacacctagctaatttttgtatttttagtagagacagggtttcaccatgttggtcaggctggttttgaactccttttcaagtgatctgcccacctcagcctcccaaagtgctggaattacaggcgtgagccattgcaccctgcctggacttgaatttttgtcagaaagagatttgcaattaatgctgattgcaactgatggcagaattaagatggtaagtcttatatcacaaccacctcctaaaatcaaaatggagctgtttctgtaggagtcagactacctcctttagaggatatgggagtagtccatcactcattcagacagttttattaagcgtgatatagtctacctctctcagcactgggcgtggtgcatctcctattgttaggcaattcccttacttcctgatccttcaattcacttacttcctgatccttcaattcactttctttataattacgaaatggtctgagataaccaggttccccttgctcaagcttccaaaaatcaggctgacaagttacatttggacatctgctcttcaaaagccaaaggcagagttttctgttaaataatgagctgtccaagcatattttgattcattcaggccacatacagcagcaggagtttctgggtggtgcctcaggtctaaattttactgtaatcctacaggttagaaatcaatgagctgatcagaacatatccagtttccaaagatatgagtggcaccatcaatataaattagttctccagtaatgtcaaagggcacacttagcagtgctgtcagaacaaccagaaaaaccacattcaaaagggaacacagcctaaggcacacaactcatgataaatacctgggaaaaaaccagttagctctgcctttagctgttcccaccccaattttcacgattaaaactacaatcgacatactaattagtcggcagacatctctataatgtttatactcctaaaaaacatgttatgttggttaactgaacctatacaatacttagaaatctccctaaagttatcctaaaaacaaaacaaaaacaaaaactttgcaagctttctgagttcaaacctgtaattttgttacctatcagtgctttataaaagagctaagataattataaggaacaagcctcctaaaatgtaaaattccattgttcctctactacccgcccatcagtggcaaataaacaccttaccatgacattcactgtgagtattgctagcgggagaagtggaggagaaagcagtcaattatacctgatgatcagggatggagagagacaggagggatgctgagttggccttgaaggtcaagtcccaagctgggccactatctgattgggagatagaaagtgagaggagaaaggcatttctggaaagaaatccctgggggcaaatattctgcagcactgaaggcacacaggattagttcagttactaaagtgcgggtagacaggggaggaagaagaagagagttggaagaggagactggaaagcagactgaggcaaggctgggaaggccttgggtgctagcggcatttggaatttgtgtgctaagcagggagaggccatctgagttctcccatgcattgagtaaacaacacgtcccgacctcgtggcaggtattcagtcagctgctggtgagcaacgtggctcctgtccctatgaagcttaaagtctaaggtaaggcagaccctaggaattcggcgcacagaagcctctctgctgtgatggagaagtaacagggacgatgaggacatagagcagggaagggggcctaggaagctattctggaagaagtgagttggttcctgaagttgaagcacctgcagaggtgaggaggtggggagcagaagtgcaggatccatctgtgcaaagaggctggggcctcaacaacatgaactgttttaatcagatttgcattttagaaatgataaccctaggcctggagcggtggctcatgcctgtaattccaacactacgggaggcagaggctctactaacaaatctctactaaaaatacaaaaattagctgggtgtggtggtgcatgcctgtaattccagctactcaggaggctgaagcaggaaaatctcttaacacaggaggcagaggacgcagtgagccaagatcacaccattgcactccagcctgggtgacagagcgagactctgtcttaaaaaaaaaaaaaaaaagaaaagaaagaaatgataaccctgaccaaggactccaggaaaagatggtgttaatctgtggccaagacaagagtgcagaaagtccttactgtcctctggcaacaggggccaaaggcggaggctaataaggtggtgcagacagaaagggtgggatttctggcagaactttcagaggcagaggcagcattttacaactcacttcatccgggcagggggtctgggaggaaaaacattgaaaaaggtgcccagtttctagccttagcaactgctgcaggcagctgaactctgcaagggttcttatttggccctgacattctatacgcacttattagcattttattcaagaagagggtggttcccccaaatgtttccatatttagccaaaggaagctaaatttcaaacttcaagtgtctactcaaacctaagactgaacccctcaatttccctcataactccattatcccccaggcttcctcacgtcagtaaaaggcaaccccatctcccaggtgctcatgccaaacacctagagtcatgctggagtctcatcttccctcctaccctgctccctattcatccgtaagccctaggctctgccttccaaatgtttccagaacctaaaacctctcctcacctccctgcaagctgcttggctgaagctctgttctccctcacccggattagaggtagccccagacagcatgcccttcagtctagctccaacatggagggcaggctgattctttccaaaggtaatcagatggagttactcctcggctcgaaactctgcagtgggttctcacttctctcagagtaaaacccaaaatctacctgctctctttccctctcatctacagccaccctgctgtctccctggtcctggagcttggggccacacagtgtctgttcctgtacctggaatgctcttcccccgtagccacaaggcttagcccctcaccttactgtcctagctctaatgtcacctttttaggagcccaatcaatcaccaccatatttaaaccccagccttgccagtcccccttctttacattgttgtccatagcacttctcatctgctatcagactttaaaatttattaggctgggcacagtggctcatgcctataatcccagcactttgggaggccaaggcaggtggaacacctgaggtcaggagtctgagaccagcctggccaacatggcgaagccccgtctctacaaaaatacaaaaattagctggacatgatggtgtgtgcctgtaatcccagctacatggtaggctggggcaggagaactgcttgaacctggaggcggaggttgcagtgagctgagattgtgccattgcactccagcctgggcgacagagtgtgagactccatctcaaaaataaataaaatttatttattaataatctcttctaaccggaatgtacactcccagagcaaagggatttttgcttattttgtttagctacatccccagcacccagaatacagtacaatgtacggtaactatcttacagatgtttgttgactgaatgaaaagtcacctattaataaggctccctgagtcacctggacaaaatagtaagccctcacctcttttgcccttcatgcttatttatttttccttgcatatatcatcaacgtgtgataaatgttaataccacatattagtgtgtttattctcttctccacacaagaatgccaactccataggggcaggaatcttgtctcttttctctttgttgtatgatgaacacccaggacagagcctggcacagaggagatgagaaagagaaggaaggagagacagaggtcaggtgtggtggctcatgcctgtaatcccaacactttgggaggccaagaggggtgcactgcttgagcctggagagttcgagaccagcttgggcaacatggtgaaaccccgtctctacaaaaagtacaaaaatagtagttgggcgtggtggcatgtgcctgtagtcccagctacttgaaaagctgagtcgggaggattgcttgagcccaggggtcaaggctgcagtgagcaatgatcatgtcattgcagtccagcctgggtgacagatggagaccctgtctcaaaaaaagaaaagagaaagagaaggaaggagggggagagagacgaaagaaagaaaaagaaaggaggagggaaggaggaaggagaggggcggaatggagggaaaaggagaaggaaagacagaagaaggaagagagggaggaagggagaagggaggaaagagaaagaaggagacagggagtgcggaaagaaatagaaaggaggaaggaattctaactccatattatcaaggtcacagatgagtagcctaaaataaaaaattggttgttctacctagagcaagagattctgtcaggattctgtcagagagcagtgaaacaactggccatgtttttttttttttttttttgaaatggagtttcgctcttgttgcccaggctggagtgcaatggtgcattctcagctcactgcaacctccacctcctgggttcaagcaattctcctgcctcagcctcccaagtagctgagattacagacatgtgccaccacacccggctaattttgcatttttagtagagacggcgtttctccatattgatcaggctggtctcaaactcccgacctcaggtgatccgcctgccttggcctcccaaagtgctgggattacaggcgtgagctgctgcgcccagcctaggcatttctttaaaatctatccattcatgtgctccattagtcaaaataaaaggcaatatctagtaatgatgccaggataaggagtaggctacattggattctaatcaaaggaggcatgagtcactgaaaaaccatcatcatttgttggctgctttcttctatagtttctgaacaataaataagaaggattggccaatcttgttacttggcataataaaccaggtaagcatacttgatgattcaattccatttggaaccgatactacacgttaaggaaacaaaactaacattggcattcagctgagttctgtccaacgaccctttgcctccactgtgtcttgttgggcatgctgctataattttaaaggtaatgactgtaatagtaccacctcgcattcatgtgagttcacgtgaattaggcttctaccactcttgaaagtaattttaattatctcgtttaatgaccttcaccttgcaggaaagaaacagagacatgaagaggttaagacaagtgacggaggtctcagggccaggcagggaaagagtgacttgttttggagggtgggagcccacccacacaatcaaccacagtcacccagatctgcccactgaggtgagagaaaggaggggaaataaaacagcaagcccttttctttcctcctcatatctgttctcaggactcatttcctgtctaactcagagtcaccttagatccttaaaagtgactggaaccaagtcactaaaaaaaaaaaaaaagaaagaaaaaagcaattatttttcacaatgtgaagccttctttgggagaagttggctagaaaataataggagaaaaggctggaacaactgtctaggacatttcctaatatgttattttcaccccccttccctcaaaggtcaacaagatactccactgtggaagcttcttcaaaagcagttcatctggatgtcttcaatactccagatggcttctctaagtcctactccaggccgatcgttatgcaatctgttatcttcctttccaactgttttctcaggcttttttttttttttttaaatagggtatcactgtcgcccaggctggagtacggtggtgtgatcacagctcactgcagccttgacctcttgggctcaagtgattcctcccacctcagcctcccatgtagctgggactataggcatgtgccaccacacccagctgatttttacattttttgtagagatgggatttcgctatgtttcccaggctagtcttgaacttttgggttcaagcaatctgcccggctcagcatctgaaagtgctggaattacaggtgtgagccacagtgcctagccaggctaatttcttatctattgaaagctggaatccaatgcaggaatccaatgcagaaactatgtaagatttcaatctgttatatatctaccatcttcctgagacaggccattgaaagtcaaattccactgtcatttgttccaggggaaaaaagaaacatgaatatatatgtttgtaaacacaaagatgatttctaaaaagataaccaataaactggtgatggcccgtgcctttgggtaggagagttgggtaactgggttaaaaggaggcaggaaaactgacactttattttttatttatttatttattttgagacagggtctcactctgttgcccaagctggagtgcaccggtgggatctcggctcactgcaacctccgcctcccaggctgaagtgatcctcccacctcggcttctcaagtagctgggattacaggcatgtgccaccatgcccagctaattttttgtagtttttgtacagacagggttttgccgtgttggccaagctggtttcgaacttctgggctcaagcgatcctcctaccttggcttcccaaagttctgggattacaggcgtgagccaccttatctggccaaggctgacacttaatacccttttgtacctttcgaaggttgtaccatttgcatgtattacttattccaaaaattaaatgaaaaaacaaataataggtggaacaaaactgaagcttggaaactgtgggagccctttatcaggaaataacaaacatgatggtatcacatcttgactttccagtgatggtcaacaacagaagcatttaccagatagtgagctccccacatgcaagcggcaactttaattgtaccttaaatctttgcccttgtattagttatctgttgctgcctaacaaaatacccccaaatttagcagtttgaaccacaagtatttataatctcagtttctttttctttttctttttttttttttttgagacggagtctcgctctgtcgcccaggctggagtgcagtggtgcgatctcggctcactgcaagctccgccttccaggttcacgccattctcctgcctcagtctcgggagcagctgggactacaggcgcccgccgctacgcccggctaattttttgtattttttttttaatagagacggggtttcaccatgttagccaggatggtcttgagctcctgacctcgtgatccgcccgcctcgccctcccaaagtgctgggattacaggcatgagccaccgcgcccggcctataatctcagtttcaatggatcaagaatctgggtatggctcagggtctcctcccaaggctgcagtcaaggtgtgagccagagctgcagtcacctaaaggtcggcctggggatgatccacctccaagctcactcacagggctgttggcaggattccatcctcttgggctgttggccagaggccagctccagttctttgccatgaatgtctctccatggggcagctggcttctcttacagtaagtgagagcatgagagagcatcagcaagagggaagtggggtgtttctgtgccccagcctcagaagtgacatcccatcactgtggccatattttattcactagaagggcatcaccaggtctaacccctgctcaagggagaggatttcccagaaacagaagaaatcacaaattacacttcacaagaatcctgagatattttagaaaggttccaaatttggccaaaagtagcttaagaaggcttttatggaccaagcataagaagtttagcagggctgggtgtaatggctcacacttgtaattccagaactttgggaggctgaggtgggcagattgtttgagcccaggagttcgagaccagcccaggcaacatagcaaaaccccatctctacaaaaaatgcaaaaattagctgggcatgtgcttgtggtcccagctactcgggaggctgaagtgagaggattgcttgagcctgggaggtcgaggctacagtgagctgttactgcaccactgcactccagcctgggcgacagagtgataccctccctcagaaaaaaaaaaggaagaagaagaaggagaaggagaagaagaaagaagtgtagcagcagagagaaattacttcactcaaaccagcattgagagaggcagagaattaggagcactcacaggcagagctgaaaggctcccagaaggggcaaaaataaaatgtaaaattaacctttgaaatccaaagttggtatcaggtatagcctaatgttcactttttaattttagcaacaccgaacatggtatttctaccttatttttagtataattatccattcttaacttgtgtaatgaaagaaaaaataggggcgggcatggcggctcacgcctgtaatcccagcactttgggaggccgaggcgggtaggtcacgaggtcagcacttcgagaccagcccaaccaacatggtgaaaccccgtctctactaaaaacacaaaaaaattagctgggcgtggtggcgggtgcctgtaatcccagtgacttgggaggctgaggcagaattgcttgaaaactggaagacagaggttgcagtgagccgagatttcccactgcactccagcctgggaaataagagcaaaactccgtctcaaaaaaaaaaaaaagagaaagaaagaaaaaataacaaaaataacataggtaaattaacagttataatattaaacagtctcttttggctaaacctgttataaatcaccacggcatataaatgttagagcttagatgctgaataaaccaactggccttgaagcccacatttctaattctcataacagatttattatgaatctcaaatttcacaaatttgtctgtctgtgtaaaattgttttggaagatgtcaataaatgtagaggaatgtttaaaatctgaagttggaaaaaggtaaagcaaacattagtttttaatcttttgctcacttgagtaaatccttgaaaggattaaaaaatatccaacttgtgaaatttgtttaaagtccttttaaaataaaaatgcataaatgtataattactctaaacctaactgaagactttatagaattcacccaatttgaaaacaggtcttctggcctgtttcccaagtcattatgcacagctgtgggaaacatcctgttgtatgtttacatatattaacagcttcaggaatttcacaattaaaactatggtgggctggtttccaattcaggcagctgggtgagggggtgtggagagcaggcaaaccagaaataaaaacaagcttcttgaaagatgggggaaaggaaatcgtaactacttagtaatcaggagtccatatagtttgccagttctactaaacgctggagggatttcatttaaaccctaagaaatacacttgttcaatcattttgcagccttcaaaatctctcagttggcttcaaccaagaggttgcctgatggaggtaatattgtacacgatatgtaaaaaacttttatttttttctgtggacagtttcaccccaacagaaggaagctgtggtttcacctttctctcttttgtttttccagcatgcctgcccctcgtcctgacataactgattaggaaatgatttctaaatggtcaagagtccagcctcgatagccacttctctgattccaacagaatttctacagaagacaatttccttgtctcagcaaggtatgtatgatatatgtggcctggccaggccggctgctcaaacagagctgtgtttgggtcagcccactgtttaaaatgttaaaatcagacatgaagaccattcacataaccactgctggtcagatatgagtcatctccaagaacaccaaaaaaggaagcattaaatgctgattggtctccttcaaaatcacttgggaaactccagaaagggaagggataaaacacaggaacttctacttcttcaaagtctcccgaggtgatttttaatactcagaagttgggactgagttcctgatctaggttgaagtgtaatgtgaattccattcttgccagtaggtgcgttattttaatcattatctttattcttgagactgtttcactccatctggagacagctttgttgagttttggcaacactgcagagttgttaaaatcataaaacagaaccacctgtttttgagctatatgggttattagaaaaaatatccaaaattctttatttttacaagaggaatccagagctcagaaagattaggggaggtgtgagtgctgaacttgtatttagtctccctgggcctcagtgtccccatctgtaaagtgaaaattaatatattcattaattgatcagttattgaatgcctactaggttgtggactccagggatgaagaagatacgtgatctctcactataacttaaatcctaacacagactgttacagttcaatatgggaaacataggtgggtgcagtggctcgcaccagtaattccagtactttgggaggccgagatgggaggatagcttgatgttgatgccaggagtttgagaccagcctgaacaacataaggatacccctgtctctacaaaagaagaaattttaattagccaggcatagtggcacacacctgtagtcctagccactcaggaggctgaggctggaggatggcctgagtccagaagtttaaagctgcagtgagctgtgtatgatcaggccactgcactccaacctgggcaacagagcgagaacccatctctaaaaaccagtaataataatatttaaaatacagtaaatgccaggagaagacaatatgctcaggttgcagtgggagcttggcaaaaccatacctaacccagcctgggaagcacatgggaggcctctgccatagggcagaaagctgctgcagtgaaatccatttaattggagaatggagcagaaagggcagaagatgcaaagaagccctgctgtctatagaatttgcgaaaataagatgaagcaatagtttgccagcagcaaataactacacagatatgagctatgaaattaagtaagactcatcaaggccacccacagctgctgcgttgcagacgccaatccagcatccttacgttacaccattcatttatttcaatcattttccccataggtttatatctagacatttccataaacccaagtaaattttttattatgcgtgtaggcatcctataaagagtagactcttacattgtctactttccaagccattctctgtcttgactacgcatgagagaatcagccaggtttatcccagactggctaataagactctggcaaggagaactcaggcatcaatgtttttgatgcttcccaggtgaacttgagaatctcatttatcaaaaagtcaagaatgaatggtgcgcacacacacagacaaaaaattcttcagtcacctctggtttatgcatttttagaaaggctccagataatatgaaatctatttgtttgagccttgactataatatgattcttttaggaaaacagatttactgtctaaatgatacctggctcagattaattctagtttgtctctttttttttttttttttttttttttttgagacagagtctcactcttgttgcctaggctaaagtgcaatggtgcaatcctggctcactgcaaactcgcctcctgggttcaagcaattctcgtggctcaacctcccgagtagctgggattacaggcacccaccaccatgcccagctaatttttttatttttagtagcgacagggtttcaccatgttggtctggctggtctcaaactcctgagctcaagtgatctgcctgcctcagcctcccaaagtgctgggattacaggcgtgagccacggtgcccggcctagtttgtcttttctaaagatgcactggctgaagggaggcggggacgttcctagaagtatgatgggtgacagagaacacactattcaggttaagaatgctctacagagagactataaagtagaaactgtaaagattacaggggaaagagggcatctgatggaacgcaggcatggataagataatatttatatatctttatgtttaacaaaagttctaacatgcttactgtggtcctttgaaactgatgacaggcacacaacagggtggacacatatggtttaacaaacaagtcttttttatgtatttatttcctttaataatatagaaagactgtggggaataagaactttaaaaatatcgaatatgcctggtagatgctgccttaagtgaagcaagactcctgatattcacaagaagagacaatataaaaggaaattgaagaccgggcatagtggctcatacctgcaatcccagcaatttgggaggccaaggcaggtggatcacttgaggtcaggagttcaaaaccagcctggccaacatagtgaaaccctatctccactaaaaatacaaaaattagccaggcatggtggcacgcgcttgtaatcccagctactcaggtggctgaggcaggaaaattgcttgaactgggaggcagaggttgcagtgagctgagatcgcgccactgaactccagcctgggtggcagagtgagaccccgtcttaaaaaaaaaataaaaataataaaggaaattaagcattgaagaaaacacagaagccgtctcctctaccatacatcgaagggcgcatggtgacagagctgttgtcatttcaacagtatttctgggcttcccctgttctctacatccttgctacttgaaaaagaaagagtgagcagaggacataactcaggagggactcctactttaatttttactggggtgggcagagactacgctgaagaaatgacatttgggccaaaaggcaaaagataaggagcctttcagaggaagagcttttcaagcgagaaagcagcaaatctgaagttcctgggacaggaagggactcgtcatgcttcagaaactgaaggagaaaaagaatggaatttgcagggggaagccggggtcagggcgggctgggcatagagagctgtggagagaaggtagctgttgttaaaaccacagcatgagctactgcaagggttggcaggatctgagtgggtgctctggtttggaaggggcagggtagaagtgtagccctcatgtaagaaggctactggaatggtccaggagagggaggatgacagcttgaacctcgcggatggcagcggagatagaggttatcaggtggagtcaaggtcttccagaggtagaagcaacaggccttggagacggattggaaatgaaagcagggtgcagtctggaagagaaaggggtcagagatcaagtccaggcttaagccagaaggcttaagcaccagctagaggggtatcatcttctcaactgatgtcagagttcaatgctcgaggtgctgtgtttaggggcatgcaggagagtattatgaaacgtgcaggagagtattatgaaacgtgcctatgactaagtcctgcgaaaccgtagcattttaagaggactcctacccgtggtttagggtagaattcctcagcctcaaccctagtgacgttttgggtaagatacttctttgttgtagaggctgagctgcatattgtaggatatttagaagtatccctggccttgaccactggacgcttgtagcatcctgaattgtgacaacttaaaatgttccccagggagcaaaagtcacatctggttgactaagttaagtatacttttacaaagtctttaataaactggtgccggtcttctgtctcaaaaagttcacgggcaggccagagtaagagcttcacaaatcatttcaattttctcatgttccggctttgttgacaagcacctaaaattgactttaaaaaaccagacctagtattaaggtggatgctgcctcatcgaattagaaaacaattggagttatactaaccccaaaatacacaagatcttgaaaaatctttatcctttgtcttttgacaacaacataaacccaaaatagagcagtgagtggatataggtgttagctggattttcccctgtatgtaaatatttcatagctcagagttatgggatggtgtttatttcaaataacatttgtaaaaatatctctaacccaaaccaaaatgccataagagtcctttttttcctaagtagatgcttaaaacaaattcccgatatttttgttgcatttccaaagtatggcagtaagtatcaaaagttagtgcaaaaatctttaaatatctatttttgttgttgttgttgttttgtctcgttctgttttgtttttttgagacggagtctcgctctgttgcccaggctggagtgcagtggtgcaatctcagctctctgcaagctccacctccagggttcaagtgactctcctgcctcagcctcctgagtagctgggattacaggcgcgtgccaccatgcccagctaatttttgtatttttagtagagatggggtttcaccatgttggccagtctggtctcaaactcctcacctcaagtgatccacatgcctcagcctcccaaagtgttgggattacaggcatgagccaccgtacctggccgtaagtatctatttgtgtttgtgactattatactaagttatgaagtccaagaaagaacttggttattctcctctggcagcttagtgaaggagtaaaagccataaaattcacttaattaggccacggtggattcttttcattgtagagtcactataaaaacagccaacaattattggttcgatgttgttcaatggccttctctctcataaaacatgtgtctaataacggcagctaatgctagtacctatcagtgtggaaaggcatgtttctgactttactatttaatgtgtaattatagaacaggtgctacaatttaagaactgcgctgggggctgagctacaacatgagtcttgccaaggtgctattctcaccaaggtggccactagtgtaaacacagacaaatagaccagcaatgacaatatagctcagggatgccacacccctaggcccacatctgtcctgcttctcacctgctcaaggtgacaggactaaggaatcctaacacacctttgctgccgtggctggacatcacttcagaatccagctcgtcaaaagcctctcagccagggattctcaatctggagcaggcatcagaatcacctggaagttttattaggacactgattgctgggtcttaaccccagagcttctgagtcagtgactctagagtgcagcccccagtcatgctgatgttgctggtccagggaccatactttgaaaaccagtgtctaggcaaccaccactgatcaagccacatctgatataaaagctagctaccatctccgagatggtaccacctatgctaagatgagaatgtacagggaaccactagaacaaaggaagagtccctcactttggtctgggaaagacaaggaatcaggaaatcttccaggaggaggtagcacctcaagtgatccacccatctcggcctcccaaagtgctgggattacaggcgtgagccactgtgcccagccaagcccctttatttcaaaaacacaatgtgttcttccaatggttcatgaaaactagaaacacaaaaaaatgttaaagggtgtttttaaaaattaaggtttgcttgaaagagatactcttatcttttttacgtctagtaaggggtattgaaatacagcagatatggagaacaacatcgacttggaacagaagaatgacccctaacaacttagagcttagacaaatttgagagtttacaaagactgccagacaggatgttatgttagaaatacatttaagcgatattaaaataagtattcaaatacaaaattttgaagacaggaaacttcataatattcatgttaaattctcaggatcctctggaccggaaatcattgtataatgcctaagatatcgtggcaaacaaaattttacaagcaaataaaatgtactttagttctcacaacggtcaccaatctttatatacccttagtcctctgccaagtgcaattaaagccactttatgcttactgatttccttatgacacacacacaagaacctaaaagacaacataaattcgtctgataaaaagtgagcctaaaagctccatctagagcactgcgagaggagctccatctagagcactgcgggaggagctccatctagaacactgcgggaggagctccatctagaacactgcgggaggagctccatctagaacactgcgggaggagctccatctagaacaatgcgggtggagctccatctaggacactgtgggtggagctccatctagaacactgtgggtggggagtgttggctccgctataccatttcctcttgtaattttggcttctttgtcatgagcttctttttcaaagttggcttttagagcccattggttactgatatttactgattttcagtttttaaaaagtctattcctttaaaaatgctctaaagtttgtcaaacctcaggggttagatacctttttgaatgtcagtagtttttctgaaggtttaacatctatcaaaatagagaaaaaacacctttaaaataaataggcctcatttaaaattttatacatcttctaaagggacctatatagtatccattgtgtagacatgacagtactggataaaagtgaatattagtcccagccacttgggaggctgaggcgggaggatcccttgagcccaggagtttgaggctgcagtgagccataatttgacactgcactccagcctgggcaacagagcgagatccatctataaaacaagacaaactgaatacggaatgaacaaaataaaacctattgtctatccctgctactgaaacacatatattttattgtcatctggacctacaaagcttgaaatgatttacaacctgtacattttaaaaattggaagcttatgacaaatgagatcacagagaggcatggaattacaatgagagggtatcctataaaacatcaggtccatcatttgaagcacgaaaaaatcggagcttagaaaattaactggccgtgcatggtggctcccagcactttgggaggccaaggcgggaggatcacatgaggccaggagtttgagatcagcttggccaacatggtgaaaccccatctctactaaaaatacaaacaattagtcgggcgtggtggtgcccatctgtaatcccagctacttgggaggctggggcatgagaatcgcttgaacccaggaggcagaggtcctggtgagccgtgattgtgccactgcactccagcctgggtgacagagtgagactcttatctcaaaaaaaaaaaagaaagaaaggaaaagaaaagaaaattaactgctcatcactgaactgaaagttaggaaaagagtaccctaacccagttcctggcaccacccactcccccaaaccctgcttcccttgtgtttctcatctgtcccatggggataattcctgtcttgccaactcccaaatgaggagattttaaaactataaagtgctttaaaaatgtaaagaattgctattattagctgaggtcagccagcccattcagtgactcaccagagctgacatctcctgggcttgtttcccaaaaccaggctgctgtttattacaaatcatagatattaaagatggaaaaaatatcacaacacagcccttttaggagaataggaaaataaatcctccttccactcccacccccaaataaaacaaaatgcttggcagatccaggagtttctataaggagcttgaatatacaggaagtccacaaattacaaatgattttgtgttccaagagttcatttctgggtgggttaccagatgaaatataggacacagagttatatctgacattaacataaagaacacatcatttttagtgtaagtcagtcccaaacattgcataggacacacttatactaaaaaaaattactcatcatttatctgagattcaaactgaactgtgtcctgtatttttatttgttaaatttggcaaccctatctctgagtcatttggatcgattttccaaccttcggctgtgaggtctcggaaagaaccctcgccttgtgagtctggaaacacgactgcaatttctggttttgtcaattactagttctgagacttcaggcaagttataattcctttgcttgcaaaaagagaccaggaaattaatacaccacgggactaagtgggtcaatataacatgtggaaatacagtacattgagcacaaaagcagcaccactttgttatactaccctacacacatgaaaagagtgatttggtttttaagtcaggccacacaagccaattttaaaagtcggttttccacaagaaattccctggctttagcaagttcctataccatacaaagcgcccctttcccacatctgagaacgttttgagccatgtatggtggtcttgtccactaggcaaccctgtatcagccctccaccctgtcatctttgtccataaagcacggcttgtgactttgcacaaatgcttttttttgctcacatgtacatactttgttgccaaaaaatagtggattattttacataaattagtgcaaactaaaaggctgataccaatgataggaagcactggcttccgaagcgtttccagcatccccaaacagctccttaaacccaatcctatgttgcaattcccaaaactgtgtctccaacctagacttctgaatcaccaatgcttgacccccgaccacacctaggtgtcccagcaactcaaactaaacatgatcaaagctacattcatcttctaaaactactccttggtctcagtgatgccatcacctttagtcgcttatgttagaaatttgagaattgtcaacaattctcttcttttacatcttcaaatccaacccatcaccaagaccaggattccccttgtgaagtgcggctcctaccttccagttctcatccccactcccatcatcgggcccaaacccccatcctctctctctcatggacactgcagcagcctcccagatttcctctccttgcttctggcctcattccctgcccccacccccatcccccaccaacaaccaacccattccccatatcgcagtctctggattatcaaacaaaaccaggaatcaaatcacatcacgccgctgcttaaaaatgttagtgacttcctatcaggttctctgcagtttggtgcctgcctcccttatcccatggtagccccagcatcatgtcacacccagtattctggcctctcacaattcctagagcacagcactaagctctcacccaccccagggcctttgcacatgcggttcccattgactggaccactcttcccctgactggtactttcttatcctctaggtctcaacttaagtataacctccttcaagagaccccactccctgggccattttttaaattatggtaaaatggacaaagcataaaatttaccattttaactacttttattttatttatttttttgagacagagtcttgctctgttgcctaggctgaagtgcagtggtgcgatctccactcactgcaacctttgcctccttggttcaagcaattctcctgcctcagtctcccgagtagctgggattacaggcacgcaccaccacacctggctaatttttgtattttttagtagagatggggtttcaccatgttggccaggctggtgtcgagctcctgaccttaggcaatttgtccatcttggcctcccaaagtgctgggattacaggcatgagccaccgcgtccggccttattgccttctaagtgatattaagtgcatccacatgattctgcaattgctaccaccacccatccctagaaatttttcatcttcccaaactgaaactcagggtccattaaaaactaactctccattccccactggctccagcccctggcaaccactgctcagttttctgtctctgaacttgactattctgggcacttcatataagtggaatcacaaaatatttgtttgtccttttgcatctcatttatttcatttagcataatgtcttcaaagttcatccatgtagcatgtattaaaatttccttccttttttctttttcttttcttttctttttttttttttttttgaggcagagtttcactctgctgtccatggtggagtgcagtggtacaattttggctcactgtaaactccgcctcctgagttcaagcgattcttgtgtcatagcctcccgagtagctaggattacaggtgcccaccactgcacctttttgtatttttagtagagacgggggttcaccatgttggccaggctggtcttgaacttccggcctcaagttatcccccagcctcggcctcccaaaatgctgggattacaggcataagccaccgtgctcagcgaaaatttccttccttcgtaaggctgagaaacatcctaatcatatgggtacaccaattttgtttattcattcattcgtcggtggatgcctgggttactcctaggccattttaaagtaggtcttcattattctcttagaaatatcttatttttctttaaggcctttatcacagattataattctaatatcaagttgtttcatatctcttttgttcaatattttgtttagtctctatctctcatcacactctcaacaaccccataagctccctgaggggaagggcatgtctgctttgctcctcactgtgtttactgccagcacctggcaacgtagtgggtatttaataagtaattgttgaatcactgaatgaaagaaaatcactaggccacctgaaggccccttgtctttagagtcactgtggaccatgtaatcaattgtgaaggtgagccaatgcatacttacatccacacacacatatttgtagctctctgggcacaaaacattccttttataacatgtcagtctatttgcaactagcacacatttccatggcctgtgctttttttgaaggatgtattacgtgcaccagtagctagtgtgtttggcaatataaagaaattaagtattgacaaataatacaataaggatgaaattttattaattttttttttttacaattaaaaagaattgagacagggtcttgccacgttgcccaggctgttctcgaactcctgagctcaagtaatctgcccacctcagcctcccaaagcgctgggattacaggtgtgagccaccacacccgaccgtaatatacatgaaaaacatcatgctaagtgtaaaaagatgatcacaaaagaccacatatcatacgattccatttacataaaatgcccggaatcggcaaacccacagaagcagagggtagatgagaggctgccaggggctgcggggacaaggcgataaaccaggcagagctaaaaggtacaggatttctgttaggggtgatgaaaaggttctgacgtagattgtggcaacagttgcacagctatgtaaatatactaagaaccattgaattgtatattttaaaaggctgaactgtatggtacatgacttagatctcaatatagttgtttaaaacaaaaaaatccatgtgtatggagatggggagtggctggaaaaagcttaacctcccaattaggcaaaagacaaacaggatagggagggggactaggggcttgtgagtggcaatagctgcagcagcagccctggcaggacagcctgtgggttacagaccgccctcctgtcaatgaagtcaagtcctctgcttcctgaaaaccgcctcttttttctaacaatgttctttcccccaaactaggaagacaggctgatggtaaacacaaagttctctgaaccaaagccttatatgtatgtttctgaggaggctctttataacctagttgcaagcaatctgaacacagcccagcgaatttccagcttttgaaactcagatttccttttgcgacccaggttctgctgagaaagttatctttggctcctctctctctcacaccccacatcccatctgttcggaagtcctgttggcatttcgatctatcaaaataaaagttgcacgtatgcctgtgtccgatcccattctctctgtgtcctttctcctctgtctttctcaagaatctgacatctcagccccacagctaccatcctggcggacactaccaccctgggaaaagcttccaccctcacttgcctggctttgcctcctgcttgaactcccggattgggagccttctgcctggactggtcttcacacagatcacaccactccaaggagcaatgtcctgcactgagccatcttccaagaaatcaaagccaaagtctttacatagcctggcaagccctgcaagacctggctccccttcctctctgcccttacctccttcttctccttccctcccccacttactctttggaggaacagctagataagccaagcactcttaccctagggcttctgcagcaagttatctgtcccctctgcctgggacactctttccccaaaacttcctgtgccaccctctctcctcctgagtgtttgctcaaatatgaccttctcaaggaggttccactggccactctatttacaatggcagcttgcacccttgccctcccattctctcggtcccagtgacctcaaagattcagggcatgttagctgctacttacatcaccattcacagcctaaggttctcaaattgacttttaagaattttcatgttgttctacagaaggagagaaagcctaagactgataacaaaagtctaaatgctcttaatgcagctgaactagacaaataaagtatcagatcgccaagagattaaccatgttaaccccagtattctttttgtggctgtggttggcattaaataggaaagtgggtggacacgtagggatagtagtatttttggttggcttcaagctttgatgagtttttgtgtgttttgttttgttttactttaaaaacctgctttttaaacacgtaaatccttatttggctaattttcagggcacagtgtgagtataaactcatatgagagtctattgttctctagaaactacagattaaggtgtctttaacagactgatgtctaattattacataaaggcatctgatttttataccaggacacctataagcacattattatagaggtggaacatttgataactctgccatgctacagtctgtaactgaccttttgccttgccatggattctaccctaaggggaaaaacaacctgacattaaaaaaaaaaaaaaaaaaaaaagtcaattctatggaatgtcatctctggaaggtggctgtggttagcagagatggccagatagtagggccacaaccctggggcttttacacccaccctgacacagaggaaagagtcacccatagcacagaccagttggatgatagaatggcatatgacggtcatggtggtgcgtgcctgtaatcccagctacttgggaggctgaggcaggagaatcacttgaacctgggaggcggaggttgaggttgcagtgagctgagattgcaccattgcactccagcctgggcgacagagcgaaactccgcctcaaaaagaaagaaagaaagaaagaaagaaagaaagaatggcatatgactgccagctcagtgagagcagctgcaggtgaaaaggagaggcacgtgctgccttcaggtgtcttcaacaacaccctcctcccacattccctgcattcttatttccatgctactctggaggaaagcatggtaataaatactataatacgtggccctgcccatcttatttatgaaggatacattttaccaaactgaataaggggggctcaaaaactgacatgaacaaacagatatgtgtatgcccaggtccatggcagcattagtcacaatagccagaggtgggccaggcatggtgactcacacctgtcatctcaacactaggaggccaaggcaggaggctagcttgagccctggagttcagcctgggcgacatatcgagacacacagacacacacacacacattttttttttcttttattagctgggtgtggtggtgagtgtctgtagtcccagacatttgggaggctgaagcgggaggatggcttgagcccaggagttcaaagctgcagtaagctatgatcacaccactgcactccagcctgggcaacagagtgagaccttgtcttaaaaaaaatttttttaattgaaaaaattacagtagccagaggtgaaaactacccaaatatctatcacagatgaatgggtaaacaaaatgtggtatgtgcatacaatggaatattattcagccctaaaaaaggaaggaaattctgacttgtgctacaacatagatgaaccttaaggacattacactagtgaaataagctagtcataaaagggcaaatattgcatgattccacttaacctgaggtactgtagaatagtcaaattcatggagaaagcagaatagaggttacagggaccaggaaataggaagaagggggtagttactctttcatgggcatagtttctatttgagatgataaaaagttctgaaggtggatggtggtgatggttgcacaacaatgtgaatgtacctaatgccactgaactgtgcactgaaaaaggatcaagatggtcaatgttatgtatattttacatttaaaaaaaaaaagtcaggcgcagtggctcacacctgtaatcccaacactttgggaggctaaggtgggcagatcacttgaggtcaggagttcaagatcagcctggccaacatggtgaaaccctgtctctactaaaaatacaaaaattagccaagcctggtggccatgcctgtaatcccagctactcaggaggctgaggcaggagaatcacttgaacccaggaggcagaggttgcagagagctgagatcgcaccactgcattccagcctgcatgacagagcgagaccccatctcaaaaaataaaaaaatttaaaaactcccatgaaataaacttctacaccaagaagacaagatcataaggaacctctcctcctctcaaagttgtactggtacaaatcagagcacagattttcttttaattcttacaatctttgtagcctgatgaacttcacacacttggagtccttactgtaacaaaagttctggaggttgctgggtgcagtggcacatgcctgtattcccaactactcgggagactaaggcgagaatcacttgagcttaggagttcgagaccagcctgggtaatatcttgagaccctgcctctaaatgaaaaaaacaaaaacaacaacaaaaaactggaggttgatacagcagctactagtgcctgacttagaggactcacactttaatttttcaatataaagataggggcattatttcccagcatgaaatgtacaaaacctacccatctccccaagtgagtaaatatttaaaccacccaagccaaagggttacctatgctgttgtttgtttgtttgtttgtttgtttttgagacagagtctcgctctgtcaccaggctagagtgcagtggtgcaatctcagctcactgcaacctccgcctcccggattcaagcgattctcctgcctcagcctctggagtagctgagactacaggcgtgtgccaccagggtttcaccatgttggccaggatggtctcgatctcttgacctcatgatctgcctgccttgtcttcccaaagtgctgggattacaggtgttagctatgttcttatagaaaatgttaagtgttccttctggatctacagatcatgcacagaaatctcagaggatcatgtcagtaactcactaagttccaggaagagaaaataaggatgtgtacatgaatcacaccacactctataaaataaatagtgcatccaatccatggaagcttccctgaacagcaagaatatacattctgatactaagtgaaggacagtatttggtgcctgagggtttccaaagaggattttctagtgcaactcaatttcaataaaggttagaaaactgttttcaaaagccacctgcactaaatcaaacaaaccgcaactccagtagaacaaaagccactcagcaacaaagtaacaaagccataaatgacagccctgtcaataaagaccaagctactagccaaaggtcaggctccacagtactcattgcagaagtgccaggcttctcaatcacgctgtgggggatggtggccttcgccactgaaaggctgcccaggaacagaggtgaccctcccctccaggagtcaatgtcagactgagagctggtttcccactccatccccaccacagcttccaggcccatttgtcacctattaaatgcaaatatactagattgaaagactgataaagaacacagatcttcagagtggaagtggcctgggctatcccccaggacctaaagaaaccatccctccatgcaaagagggacaaggtcccaagcaggaagagagcagacacctgatctgctttctttctttcttttttttttttttttttttttgagatggagtctcactctgtcgcccaggctggagtacaatggcaaggtctcagctcactacaacctcacctcccaggctcaagcaattctcctgcctcagcctcctgagtagctgggactacgggcgcatgccaccacacctggctaatttttgtatttttaataaagatgaggtttcactatgtgggcaggctggtcttgaactcctgatctcgtgatccacccgccttggtttcccaaagtgttgggattacaggcatgagccaccacgccaggcctctgatctgctttctcaccaaagaagaaacccaactcaggccctctgtgaaccccacagacttccatgaagcagagaggtaattcccccagcatagtctaaagatgaatgaatgaaaggagctataccaaggttctctgtcattagcaacgcctacccaggatccacaactaagaaaaccacacagggagcaatgagcctttcaagaagccacagggttcagaaactgttgagttttaaacaggtagtaattaaaaaacaaaacaaacaaacaaaaaaaccaggagtgtgggtcagaaatggtggttcacacctataatcccagcatattgggaggcccaggcaggagaactgcttgagcctaagcgttcaggagaagcctgggcaacatagtgagaccctgtctctacaaaaaaaaaaatagaaaaaagaaaaaaagaaaaaaaatagctgggtactatggcacacctgtggtcccagccacttgagagcctgaggtgggagaatcacctgagcccaagaggtcaaggttgcagcaagccatgttcatgcctctcccctccagcctgggtgacagagcaagaccctgtctaaaataaataaataaataaagttaaaaatagaaaaacaggagcgtggaggatgagggagagaaaagaccaactgatgtgatgggtaaagggggctcaggagcattccacgggcttctactgtgcaggaagaggtagcaggtgagacagcaaccaggccccctcacgagttctcctgcaaggttaagaggcaaatgagcactctggtcctctgagccaccagggcttaagaacaacagtgtagatcggagacttagaaccttgcccctgctctggggaactctatctttccagtgcctggtgcaaatgggcactgatgtttgctaaataaatactaacttgtagaatgattcctgtttcctacatagcccaggagaaaggcaatggctgggtgagtgatatttacaaagtcatagcaacaacacaacaatgtattaacgactaccttttactgaactgtgtgctaagtcctctacctaagctatctcatttggaactcatcacacagccttgtgaggccatactattattatcccatttacagatgaggaaactgaagcctagagaggcaaggtaacttgccctaggttatgcacctaggaagctatgaggcctgcgttccaacccaggtcaaaagactccaaggctggcaacctctgtttcactgctgcctctggactgcttgcagggaccagttatgaaacatatttctcattgtggaagggttgggcaacaatttatttaaaagtgcagtgcatttataagtatcaaagaaagtaccaatatggccttaaagattcagatgataaaaagttatctgttttttaagaaaatgaggccgggtgcggtggctcacgcctataatcccagcactttgggaggccactttggtggattgcttgaggccaggagtttgagactagcctggccaacatggtgaaacccgtctctactaaaaatacaaaaattagctgagcatggtggcacacgcctgtgatctcagttactcgggaggctgagacacgagaattgcttgaaccagcgaagaggaggttgcagtgagattacaccacttgcactccagtctgggcgacagagcaagactctgtctcaaaaaaaaaaaaaaaaagaaaatgagaaacaagactaatatatacatatacacacgtatatagacatgctcatatctatatacatacatgcacatatatatgctttcagaatcttcctaaacaataccaggtcttcagtgatagaggacctcaaaagatcttagattaggtattacttttagctgggcatgggaatggggattcaggagtaacttggttaacaaaatgaaaaatataacctgtcttctttttatggtattaacactcttctggcagcaaattaattttttacttaataagaaacaaaaaacctacaggcatgaatacaattaatctaactgaatgtcaacagacctgaaaactcacaagatacctaaagacaccactaagaaaaactttccaggagactaaactagaaccaagtgtacaaataaactctaaaattaagtgcttaagcaatttaaaaggcatctctttttagagagatttgggacataaattgttctggggccaggcacagtggctcacacctgtaatcccagcactttgggaggccaaggcaggaggattgcttgaggccaggagttttagatcagcctgggcaacataacaaggccctgtctctatgtattttatttataaaaaattttaaaaaacaacttgttctggtacctaaaaagcaagttcctctgcattcatgagtgcatcggtttctttttcagtaaccgacactaaagagcaaaggtaactaggaaaaatctctctggagttgttagaattacctgcattctgtgaatgttgcttataaaaaactaaaatggaattttaattcataaggcaataaaatcttaaaaatataccagatacctgcaataatagtatttttagatatcaatctaataaagaaagtaagaaaccaacattcaaacactgactatatataaagaacattcatatgttctctgatttaattctttcaacaatccaaagagattgataatatcttttcccctcaacagagcagcaaacagaggttcagaaaacaagaattcatttaaggttatacaattaataaggaaaagaactgaaatctgtgggcatttttatattttccactactccttgcttcaaaaggatggaaaagaaagaggaaagaggaatggacggaaggaaaggaaaagaacattctacagccagatctggtagtgactccattagcactaagatcccctagactgaaaatcagattaaacataaaatcagtcctgaacttgccttaccaccgaagacttctttttgcgaagccatttgctgtaccacattattatttttaaacttctattgaacaaaaaacaaaacaaaacctctcccagttctatcactaggatgtaataacatgtgcacacaggtgtgtgtgttccttaaaatccataaggaaaacttgaaagcagccagagctgacctcacacaggtggcatctgtgttggacagtaataaccaaaagagtcttgctcggcccttaataacccacgcaaagaatcactaaaagttactaaaatacagccactggaaaacgacgaatgaacaaagtggttaatgttccttcccaaaattatagcaaggaaaactccaccacctaatgaaaatcattaagagaattcagaggagttaactgcaggcaggcgtgacttctcccccagaaagtaatcagctaataagcattaatcatcttgtgcacagtctgcgcatttataatagggtttaataaagccttcaacaacaggcccagaattaatgaacggcatcttaggtctaacacaaaagtattccttagcggacgaaaattagcgcttctacttcacatttgctgtcgtgtcccccatatatacgggctcgtattcactatccctggaggctttatcacgcgtggttttttttagcttttgttcctgaaagcagttaaccttcatcgataacctaccgtgtgccgggtgatctccaaacatcccactagttttttctttttttagtttcccatgggtagtggcaaaattttgaaggcaatgcaaccaggaagatgggagcgaatattttctcacgccaacagggaggccagtttccgggagaggaactcggcggcgtctggagctacccaggaagagcttgcagcccccaagggcagcgcgtgcaggccaagggggtcgggtagggttgagcgggtactcaccgggcagaagcgcggcccaagtcctccttacttctgcgtgtcaatcccccttccccaatttgcatccttactgcaatccagtctcccccgtacaaccgtcacggatctgcgctccgagcaccgcccccccccgcaaccagccaccaacccccggcagggaccacaggcacacgcctccgtcggaaaagttgggcagacacttcagaacttttctttcactttggggagaaggagggagttggagaagtgggggcgaggggtgttaaagcactgggccattctctgcaacatctccccgcgccccccaacaagttgcccctcctcgtgcacacagcgaggtgacagcgcagggcaccaaactgctgagggaaggagatgcctgcagccatctcagcggggctggcggacgcgacccgacagtcaccggaaaaacagtggtgtcggtcttccccatcacctcccctccccatcccacaataaagcgcacggaagatgtctgggagtacctggccctgccacaggagctggggaggagagcgatctcaccccctccatccctcccggcaggtgggccgcggtcagatacgtttggcccgcaagtccttttcggacacgttggcatctgctcccaaagagcgccccagcaggacccggtcaccggggtcttccagaggggcggtagccaccgcacaggagccagcggcatcccccaaggagccgcaagccctacctggcttaacccccggacatgtgtgtcgctaccgatcgaagaacccaaacaccccgagatttccctcctctaggcaggtgaaaaccccacggaactctccgcagcgctgcctgcccagccggccgtgtctcgccgtccccgaggcctcgggggctcccagcacctccacccaaatcccacctgtgcgggctcgggagtccgagggcgctgacagctgctgccgccgcatcccggatctccaaagtgcggcgggagcggccagggaacctgcaggacaccgccgggccaaggggcttgggaaggtctgggggcccccggcgccgcacccctgcttacctggcgttcgctgggccccggctggggcatccgcctggtgcgcgccgctcggagcgctcgctgcgcacctggccgctgccgccgcccgcccggccccagccctggccgccgcgctagcgctgcatggcgcacgggggctggccgggggcccggggaagcgtgtctagttggcggcggcacctccggctctcgcggctcgctagtggctcccccgcctttccccgccccgcgtccgtgcacccttcctctgcagccgcccttttgcctccgctccgccggaccggccaaactggtttctccgctcggggaggtgcctctggtttccctccagcagccgcggccgccgagcctcgctggggctggggctggggctggaggcgggctcggccttctcccctccctttttccctccctagggcggagaggggctggactgcaagccccggggcggcccgaggcggcccaggtccagctcctgccccacgccctccgtgcgtcctggagtcaggtgggcacccctttcagtcttccgagcccagcctacgagcccttgcctcgcccagcctgagacccagttgctgcggctgctcttagctccccgggggccgcactcgccaccacacctctccagcccagcgtcactttcccgctgcccttggctggcttggccgtcaccccgggtcgaggactgagccagcctggaaagctggcggggccgcggcgcgcccgggacctgagctccctcggtaaggggagctgtgtcctcttgatgccaagtcatgtttggggaccggtcaccgaatgcgcgtcaaagttcgccgcgtggagggtgaagaaagaggctgcgcctcaagacttccagaaacgtatcctgtgattgcagccagcaggctttctgccgagtccaaacgctatcgagtttttttgggtttggagtcaaaaggagttaaggtgcggcccgtgaaccacgcggtgtaggtggaaattttggactcagcgcctcgttgctggctggtgtctgagcgggtgaatcgtgcctccctggcagtatagacattaccctccttcttgagtagacttttgccgctccccgactatggaccgagtcgttgggataagaatggaggaaaatcaaagatcagagtttgcttaaaatgcagtaggggagccaggactcccacacgattcccagtcacctagaggctcacatctatgcccaagagtccagactcccaactgggtcatcacagaggcttcctacaggaggccgtgcttgatgggactcaaagatccacagctttaaggatcagagttgtgtagagagggtattcaacgggtggccaactggtagaatcttgtctgataccaaccccgaggctgctctaggcttctttttcatgagtcaaacttgatctctgactaggtgctggtcagtcactcaatctatccaggcctcagtttcctcatttgtaaaatgagattggaccagatggtctcttccagcacttatattctgaagctaacgacagaacaaaggtaccgatgcaagagaacatagggcctgttggtgacactggttgatctaagacatttagacttgtttttggtagcacctgcaaaccgttgacaatttaggaccgagcatgagcatgatcaaggttgtgttttagggaaaataatagggagatagtctagagaggataaaactgaagatgggagaatcacttgagaggctgggacagcgacatacggaggagttgccaggggaagtaaaaaggaggaaattcaagggacaccacagaagagagatagggcacgaagtggccacaacctgcaactgactgggagaggggagcaatggaaggtgagccaggttctcaagactgggttatggcatgcaaggagcagcagactccaaaggagggaagccgtttaggaagactctgcccctatctggataaatgccagcaaacctaggaatcaagaggggattccagactaaagggggcaccccctccttgcagatccactaccaagtgctcaacctgtccaagaaaatgttacatagaagagactaaacaaggacgcatccaatctacacctgtacctagatctgatcaataccattctgatgtctgcatttatttacttgtttatttatttatagagacagggttgggtttcactatgttgcccaggcttgtcttgaactccccagttcaagcggtccacctgcctcagccccccaaggtgctgggattacagtcatgagccaccacctgtactaaaaatacaaaaattagccaagcatggtggcgggcgcctgtggtcccagctactcaagaggctgaagcaggagaatcaattgaacctgggagactgaggtggcaggcagtgagccgagactgtgccactgcgcttcagcctgggcaacagagcgaggctctgtctcaaaataaaataatattctttcattcaacaaagatttgagtgtgagtgcctactgtgtgtcaggcagttttctagttgcttgggtacatctatgagccaatcaaatatctttttttttttttttttttagacagaggctcgctctgttgcacaggctggagtgcagtggtgtgatctcggctcactgcaacctccacctcctgggttccagcaattctcctgccgcagcctcccgagtagctggggttacaggcacagccaccaggccaggctaatttttgtatttttagtagagacaggtttcaccatgttggtcaggctggtcgtgaactcgtgacctcatgatccacccacctcagcctcccaaagtgctgggattataggcgtgagccactgcactcggcaagtatcttaaaaggtggcaaatgctttgaaaaaatagaacaggctggactgggagaaggcccctgaaggagctgccttttggagtgctgtaaaagttatatttcttgatctgaatgataattatacgagtagacgcatatgcaagaattcattgacctgtatgcttaagatttatacattaaaaaataatagaccaggcacgatggctcacacctgtaatcccagcactttgggagatcaaggcaggtggatcatgaggtcaggagttcaagatcagcatggccaagatggtgaaaccctgtctctactaaaaatacaaaaaattagccaggcgtgatggtgggcatctgtaatcccagctactgaggaggctgaggcagataattgcttgaaccctgaaggcagaggttgcagtgagctgagattgccccactgcactccagcctgggcaacagagcgaataataatactactactaataataattgagcaggattaagagattaggatttggaggatgagtcacaattttaaataatgtggtcagggtaggcttcttgaaaagctgcatttgaaaaatgacttgcaagaaggtagagtttcatctttgatgagacaaatcctttgaaaacccattttgcatggaacccaccagatggaggcatgttaaaaccttatcctaggcgcagtgcctcacgcctataatcccagcactttgcgaggctgaggccagtggattgctcgagcctaggagttcgagaccagcctgggaaacatggtgaaatcccatctctacaaaaaatacaaaataaaattagctgggtgtggtggcccgcacctgtagtcccagctactcaggaggctggggtgggaggatcctttgagcccaggaagtgaaggctgcagtgagctgtgattgcaccactgcactcaagcctgggtgacagggcaagacactgtctccaaaaaaaaaattaaaaaaaaaaacaaaaccaaaacaaaacacccacacccacacaactccacaaccttatcctagaacacttcccctatgtaagtcttcctcatcttaggaaggaggttctcagagtgcatcagctggtgttgctgatgaaggaattagctcacctggaaaccgaccttgtcctttctgaaagaaccatgccaaattttggggtgccttgtcagggcaatcactggaagtgtctcacatgcaacaattttaaaatgcatcttacatgagtcactgagagatgacttctttgtcctggcagagccctgattccaccagccttggcagccctttctcagcattctcagatgggattgaataaacactctggttttatttagaagtcactctcatttagtaaccaacgagctgctgggggaaatcacgaaatgtaacagaaatggccatttctttttatgttttattttttattatttttttgagacagggtctcactctggcacccaggccagagtgcagtggtgaccattgctcactgcagccattgtgcccagaaatagccatttctaaaagagggtaacaatgattttcaacttttgtagttcataatttcctctgtttcttttttccccccttttcttggcagcagtcttatgtacatttgcatgatgtgggtaggaaagccagggaggttgccaagagagctagctcagttttactgaaaatttatttcctggaatttttttttttacaagataagataagtgataaaagatatgtttaaatggaggtgatactgcttgtattcagttctttgctaagcccagtggtcgtttaagctaaagcatttaatgccaatggaaagactcatgctgcactaggtgctattgtaacccatgcttggcagtcaagattaactcagttgaaagttcttcacagtcattatccagaccagatccagaattttaaatctgataagacacctcttatgtgaatctgtcctagcaataagtgacattagaattttcaaatatctgccccacatccttcgaaatggcttttaaaacaacaaatacagatgatatattctattttctctggcacaatgagttttccaacattccttctaagttacaaggctttccacttcctttactacttaatgacttctttttttctgactaacattttaaaataagaaattagattgcaaaagaaatattaaacatcaagtaactaaatgtgtctcaatgattttggcaatcacacagacttaacatgcataaaatgttacaggaggaattattcatgttattaaaattcacttccctttcttttgtattcataagcatgcaaatgtgtaggattgtctaccattcttttctacaaggaagagattttaataaaccacttactgtatttctctatggaaatgtaataaacattacctgatgttgataatgtaacaccagttaaacttaatgagtaaaattaatacagacagttcatgaataattttccaaaataacttgcgattgttgttagtatatgtcgccatgtgttcctgtagttgtaggaagtttgtatgtattatcttaggctctgttctcatcattttccattgtgtcatgaaaacacatttaccttttggactttatccctcttccttcctgacctgcaccctaaatgtggctaattccaggttgctgtgaatagaagtttactagattttttttttttttttgagacagtctcactctgtcgacaggctggagtgcagtggcgcgatctcagcttgctgcaatctccacctcccaggctcaagtgattctcctgcctcagcctcccaagtagctgggattacaggcacgcacaactacgcccagctagtttttgtatttttttgtagagatggggtttcaccatgttggccaggctggtctcgaactcctgacctgaagtggtctgccctcctcagcctcccaaagtgttgagattacaggcatgagccactgctcctggctgaaatttactagattctgaagagcacgtgctactcctcctgtttgaaatgccctacctcatgtgcctgatctcatcatccttcacatctcagttcccaagtggcttcctctgggaaagctttgccctagtctccctcaaactaactaaagcttctaacatttagttggttcttgctgtttccacagcattttgcagctgacttctagggaaagcttcccattgtattttcactgtttacctgtcttgttcctcactgcactgtgagcccattgagacataaaactgagtcttattcttcttgatctcttttggcatacagcattaaatagagcattccaggtgcttattaattcttatagaatgaatgaatggttggcatggtcataattctcaatagttgcatagtattttctcctgctgatgatttctttaatcacttgctattcttggatgtttatgcatttaccaaattggtttccagaaatatctcatttatcacaacccaccactatgttaagggcttctgaaggtcatatttctatctggttcctgttattttgcaggctgtaatctgtccctctgtatttcattctagaaacagtgtgcctcagtatacaaaaaatttttgtcttgttagaactaggatatgagtaagcctttgttgctatcactggatgataaaaagaaggttattcaaattcttccataaaatcacaggagtgtaccttgtgtatgaacacagccttctgtgttttcctaaatttccagtgagcgtgagtggttgtccctcccagttaaagaaaagcaaattaaatgcaaaataaaacaatgagaaacaattttgtacttatcacattagcaaagttttttttttttaagtctggtgttgcaaacactggcaacatttaggaggaaacaggcactcatacactgtaggtaggggtacaaattgtgcaacttctttgaaaggaaattcagaactatatcaaaattttaagatacatgccatgtgccccaagaatttatgtctaggaatttatcttagagatacacttgaacattttatacaagggtaaatgtacacatatattcatggctgcatgccttttctgcaaaagaccaaaagtgacctcagtgtccattcacagaggttacttccatacaataaaatactaatctgccatttttaaaaaaattaaggaattctagtttatttctgtatacataaataaaattcatgtgtataatgtttataggtttccatttgtgtaacatataatataatgtaataaataatataatgtataatctaaattataatgtatattatgtatacaatataatgtatacataatctaaattataatgtatattatgtatacaatataatgtatattgtatgcatataatataatgtatatgtatataatgtaatatgtaactgttatatattctcatatgtgtaatatatgctaatatatgtcatatattacacatacatatatgtatatatagactgaaaatatacacaagaagttggtaatggtgctcatctctatgatgggagactaattttcacatatatgtttgtatagttgaaactattttattgtatttttccctgcttttcttgactgtagaaactttgtttttttaacatatttctggatgattttttaatttaatttttttggcaaaaaatacgcatacaaacacacatatatatattttaaactcaaatagtactgcaaagtttctaagggaagacaacagtcttgtcattcccctcttttctcaggctcaaatgctactctccagaagcactcattttaaattttagttgttcttacattcactttcttttgttttctttttttttgagacggagtctcgctcttttgtccaggctggagtgcagtggcgtgatcttggctcactgcaagctccacctcccaggttcaagcgattctcctgcctcagcctctggagtagcttggactacaggagcccgtcaccgcgcctggctaatttttgtatttttagtagagacgggttttcaccatcttagtcaggctggtctcaaactcctgacctgtgatccacctgccttggcctcccaaagtgctgggaatacaggcgtgggccaccgcgccgcggcacatttcattttctttcccggcctcccccagatggagtctcgctgtgttacccaagcaggagtgtacagtggcgtgatctcagtccactgcaacttccgtccaccaggttcaagcaattctcctgcctcagcctcctgagcagctgggattacaggcgaccaccaccatgcccagctaatttttatattttttagtagaggcggtgtttcaccatgttggccaggctcattcactttcatattactaataacaagcttgtttggccatgtcttgatgttttccccttttagacattatctactgaattcctatcagagaggcagatttaactggcttacacatcccactcctgacaccctcccatacaaactcttgctcttactccaatctcaaatcataattagattgcaacttatagccaaatcaattttcagtggacaccttattatgactatggaaatactgtttgcagttaagccatgcagtatagtaacattgcacttcctttctcataaagttttttggatttgtgttgagttaataattgcctttccccctcatttactttgtcttccatgtgcctatcattaattcagttccaaaatgtctcacataaccataaagcacctctcagtatggccagacacaaaattcaactgtttgcatttttttcccatgagacattcccggctgtggactctgtcctcttgctttacgatgaaatgatcactgtcatcatcctgagaattccttttttgttgtacttgctagttctggtggagcacatctgaaaaagagaacactagagaaaacttttttgaggcctaaggtatcacctaggatgccttcaattataaataatagcattctggaatacaaataggatttttattactattattaggtcatctctaactctctgaatagttagcagctcaatgatgtcatcaggacccaggcactttttgtacccttgctgtgccttcatcacaacaatgatgatgtgtccgctttatgtcacaggtggctacagcagctggctaatttcatttgtcagaaactgagtcataccttagctgcacggaagtctcagaaaatgaatatatatcatttacatcttctattgtgagaacaggtctcaagtcaataggaaagaagggattgggggaatagctgttggataggcaacccacagggtctgcacatcatgtgtatttaaaaatgtgtttagtctgcattcatagtttagctgggtatagcattctaggttggaatgcattttttttccttagaattttgaaggccttgtttcaatatatcctagattccagtgttgctgtcagatgcttgatattattctgattctcaatcctttgtatgtaaccagctttccactttctggaagcttttcctctgattctaaaatatcactgtagtgtgccttagtgtaggcatgcattcctttttctttttctctttttttttttttaagatggagtttcacccttgtcacccaggctggagtgcagtggcacaatctcagcttactgcaacctctgcctcccaggttcaagtggttctcctgcctcagcctcccgagtagctgggactacatgcacacaccaccatgcccggctattttttgcatttttagtagagatggggtttcaccatattggccaagctggtcttgaactcctgacctcaggtgatctgctcgccttggcctcccaaagtgatgggattataggcgtgagccaccgtgcccggcctactttctcaatcaaaaagtaatgcagttttttaggatgcatttttttaaaaacagcaacaaaaatatttgaatttggattatctttctcagttacacttacttttatccaactgcaattgacctggggtaagcttggcaacaatgaaacatcttttccaggctattccctttggagtctttcttgttctctggatccctagacttctcttcccaccacttgatgccttgcccaacctatcctcttcacattttctttacaattaaaactgacctaaaaccattgcttaccttttagagctaacgtagctaatctaataaattaattcacaaaatacaatgatgaaccctccttacacaaaacatataggcatttaatcacaatcttcaatatttttatcccaaatgaaagagtaaaaggtgggaatttcacagcggttgatgatgattaactgatccatattttctgtccttcaaatcatattccctaatccagttcctaacagttctgaaacaatgcagaagaaaatcttggctttttaaggaatgcttcattggatagcaatttaaaaatgcacttgtattcaaatctaaacaatccatgacatctgtggggcacctgatcaagaattgctcacattccatcttgtgagtcaaagcacaggattgctgtgcttctctgagtcccagcactgaagacctacacaggcatctttcctatgactcacctaaaatacttaatttctcaaagatgtagacaatcaaatgctggcaggtgattctgtaggctaaactgtctggtcctcagctgtgctgagtgacagtgatatgcataatggtagtttttaaacttttttatactgaactttcagttgttgttttctttaactctaacacctcaaaacaggagagtcatgtgtaaaacaggagggactggggcagctgacatgattggcacaatggatggcccctgtgtcaggtttaccataaagctaatgatacttaaacttcagggactctccaaagtcttatgcctcattttacattattaatttggtaaaaaaaaattttttttgagacagaatctcactctgttgcccagggtggagtgcggtagtgtgatcttggctcactgcaacctccacctcctgggttgtagtgattctcctgcctcagtctcccaagtatcttggactacaggcacaagccaccatgcctggctaatttattttagtagagacagggtttcaccatgttggccaggctggtctcaaactccggacctcaggtgatccatccaccttggcctcccaaagtgctgggattacaggcatgagccaccacgcctggtcaaattttgtaattttttttttcttaaagaactctcctcttcctcagttgtataaacttcaggccccatgaaacctggtttcacacctgataggacccagagcttcacccctccttcctctcctcttcagccctctccaaggagccctagtcctctgtggaacaaaaataaaagacaacctgtgactgggcacagtggctcatgcctacagtcccagcacttttggaggctcaggcaggaggatcacttgaggtcaggagttcaagagcagcctgggcaacatagtgataccctgtctgtacaaaaaaaatttaattgggcatggtggcatgtgcctgtagtagtcccagctatttgggaggttgaagcaggaggattgcttgagcctaaaaggtcaagtctgcaatgggctttgatggtgccactagcctgggcaacagagtaagacactgtcaaaaggaaagggaaggagaggggaggggaggggagaggaaaggaagggagggaagggggaaaggaaagaaaggagaaagaaagaaaacaacaacttgtaacaattcctggactaggaatcaggagagagggtctgacacctgtgcttgctactagccctttgtggtcctcagtcaggtcacttggcctttttcagactccgtttcatcatctgtaaaatgggtgtgtttgacctgatgatcgccaagctccctttgaaaactaagtctttgattctaagtctactggggacactttctacattcccttacaatagcctctattcatgggtttgtctttccccactgaggtgctggaaaaactcaccctctgattttctgggtcctgccaagacttagcccagcccctccctcttcaagcaatgacgtccgtgatggtgataggactgctgtctctcctctccccacaattcactgtctccactcctgctagatgaaagaggaatgacagggtgcagttctatgtgttaacccttctcagaataccttcatttaaaatagaaattaatatttcatctcaatggcataactctttagtggtgaaattttaggcagcagttgcagtcaagtctgaggaagagagatcgtcttgagctcttgcagcaggcagtgtttagaccccctcaagccacaaggggacactgcccattattctagaaccaaaagactgacccagttaaaaggcacaggagccctgtcaacgtgggtgcaaggagactttcacttggaatatcatttacactcacacagcagtggaagttaattgcatggtggaggatggggacttcacctgcttcaccatccatactccactttcccccagtcacagatcctgatattatttgggggcagcagcatgcccagctaaaggaccatgtgtcccagtctcccttcagcgtcatgtggtcatgtgataaggttctgacccatgaggtgtaggcagaatgttacatgagacttccaaaaactccctgaaagtccagaaacacacccttttctttagtcttcaagtcagagatgtgatgatgatggctgctaagtggttgccatcttggatctgaggggactttgcagatggaagtcatttactgaggagggtggaccagaaacataaaaagagcgtggctccctgatgacatcgtggtgccacttcctcagcccagaccacccccactctggacttatttttagtaagaaaataaaatctttatgtgtttaagccactagctctcagttcactgtcactcatagctgaatatattcctggctgaaataaatgagaagactaaactttccaccttttaaagaaagaatatagtgagtaaaaaacagggtaagatctaggagagatgcaaataaccttaaaactcaaccttcctcagcagaaggatataatatatatataatatatataacataaaacataacatatatgttacacatataacatatatgttacacatataacatatatgttacatatatcatatatttatatatataacaaggatacattcatttaaagcccgaatctcaaaagttcagacaatgtattgaaagggaaaataaaacaaaagcactttagtatgagcattggcgattcctgttggtcccccacagggtagaagatgagaggttggtcagtcaggaagtgtcacctctgtgcacaacctggagttgttttggaaggaggagagacgcccagagcttgagcaatgcaagcgtgatccctgctctagggaagcgtgaggtcatctgcacatgctcattcatgctcgctttgctccccgcagtagggactcctagcacctccctcagacccatctttgttttggctgctgtggccataagatctgcacaagcctctgtcacagtgctgaggatagaactggtgagcaagccccagtgctggccctggaggagatgagagctcagtgagccgagagcaaggaaacaagccatcaatccctggtaggacaagtgttcacaagggggaaggcccgtgagaagactgaggaggggccctgactcatttttggaagtcccaggaggcttcttggagaaggtgaccttctccaagaatagagacctggaggatgagcaggagtttctgtcctccccttagtcactgttcagtggcagctgctgtcacatgacagttctttgccccagatccatagagtgaagtaggtagcaatgaggtagttagaagaatacactgctgggctgggcatgttggtgcacgcctataatctcagcactttgggaggccaaggcaggcagatcacctgaggttgggagttcgagaccagcctggccaatatggcgaaaccccatctctactaaaaaatacaaaaacagtcagccaggcatggtggcacatgcctataatcccagctactcgggaggctgaggcaggagaatcacttgaagctgggaggtgggggtcagagtgagccaagatcacgccattgccctccagcctgggtgacagagcgagactctgtctcaaaaaaaagaattagttaattaattaattaattaatttaaaaaaaaagaatacactgtcctctcttttcctttcctggaagtctgaagacagaaccatctcatttgctctggaaggagtcagggccaacatcagggagtgggattaagggccagggaggatgctgagttaggaaatacccacctcaccaccctgggggtcaggcccactggactattcaggcagtgagcagcagtacccatgaccatgagccttcttctcacactcttctccccatgtgacttattttggtaacagtttcattgagatataatttattccttcccgtaggacatagctaaaaaaagagagaaagaggtaatttatataccacacaattcacctatctaaaatgtgcaattcaatggattttagtatattcgtagggttgctcaatgatcaccacaatcaattttaaaacattttcatcgcttcaggaggaaaccccataccctttggctgtcacccctcaatttccccaaccctggcaaccactgatttcctttatctcaatagtttttgcctattcttaacatctcatagaaatggaatcacttacatggtcctttgtcactgtcactgatgtcttccacgcagcagaatgtttttggggctcattcaagctgtgcacactccttcattcctggttatagccaaattatacacacaccacttttcctgtgtctcagactgatgtctgggtcagtcatcaatcctattcgtcaatttattctccaaatgcgtctagagcaaataccatgtgaaacccatggttttatggcccccaaagctcccaatccatcttcttgtctccatctctatcatcaccatcccggtctgccaccgtctgtctctgggaccaaggagctttccaaaagtgaaatgttagccttcaacagtgactgcccgcccccaaggacttcccgtgatcttagaataaagacaaagctacctggcatggctatcaacactctgcccagtctggcacttccctccactctgtttcaacttctctcttttggcttcagctatcctgtcttctctcaaacactgtcacttgccaccttgaggccttggcctggaacaggccttatcgctcacctggttaaggccagtttaccttccaggctgcaggtcagtggtctcttccaggagaaacctttgccaaaggagcctcatcatagctctcataattctcatatcactctgttcctttcccactctgtctcccttctacactggaagctctttgagggtgggcattgtctacttatgctcatcattggtttccctctacctaacagtgcctggattagaaatacagaaaggacatccataccaacatttatagtgtgccctgtaaccagacacttttattgattaatttttttagttttttaaaattttattttaaattccaggatacatgtgcaggacgtgcaggtttgttacataggtaaatgtgtgccatggtggtttgctgcacctgttaacgcatcacttaggtattaagcccagcatgcattcgctatttaccatgatgatctccttcctcctgcccccccaccccaagccccagcactgctgccccaccaccaggccctggtgtgtgttgttcccctctgtgtccatgtgttctctttattcagctcccacttataagtgagaacacccagtgtttggttttctgttcctgcgttagtttgctgaggataatggcttccagctccatccatgtccctgcaaaggacatgatctcgttcctttttatggctgcatagtattccatggtgtatatgtaccacattttctttatccagtctatcattgatgggcatttgggttgattccatgtctttgctattgtgaatagtgctgcagtgaacatatgcacacatgtatctttataatagaatgatttatattccttttggtatatacccagtaatgggattgctgggtcaaatggtatttctagttctaagtctttgaggactcaccacactgtcttccacaatggttgaactaatttacttccccaccaagaatacaaaagtgttcctatctctccacagcctcgccagcatctgttgtttcttgatttgttaacaattaccattctgactggtgtgagatggtatctcattgtggttttcttttgcgtttctctaatggtcagtgatgttgagctgtttttcatgtgtttgttggttgcataaatgtctttttttgaaaattgaccagacacttttataaagactatcttgtgtcatcgttatgataatcctatgtggaagttatcttcagcttcattttaccaatgagataaatgaaactgtggtagtataaataaataacttgtctaaagatactgagtagcagaggaagcattccatcccagacccattgaattctcagatctaagatcctgccaggctgtttctggaatacagagcagaaaattccctcctgttcaagcgctaactagataagtccttcttcacaaatgccaagtaagcacagaaaaagagcaacagggaaaaagtttatgctccaaggaagaagtcaaccccagactgcagggatcgtggtgagattgtatcaggattggaccttggggaaagcttccttatatttgagactcataaaaaaaaaaaaaaaactccccacaggtggtcagtttggttcttactggcttgctggaagtaagttctcatgtttctaaatgcagaccgggtatttcctttggaatgttctcacattgttttatttttgggtgtcaaccttttcattttagtccagcaaagaactccttgttcgtttcctttgggggatttatttttcctcctttttctgaggcggcagtacctctaccaggaaaaactgattaccagtgctgtccccagagttgtcactgaggtgtttccaccgaaagcttctctgtcactttgaggtcacctgagagcatgagagccaggctcactggtgacctcatccctctggccctattccagcagcttagctttgagcttcatcatcacagtgcagcagctgactacttgctaactaacgtgttatgccattgataaccaggaacttcctgactgacgttgaacgggaaaaggatggcggatcagaacccctagaaggaggtcatcttcatattacaaaggacagcccatttagggaagtgactttggtgttgtttaatagattccctttgctctgaagcaccctgggtatgttcttttataatcaaaacagctgatcacttttcttacagagataaatttgctcaaaaataatgcatctatgtatacaatgaaatattattcagccttaaacaggtaggaaattctgacatgtgaatgaaccttgagaacatgatgctaagtaaaacaagccagtcgcaaaaggataaatactgtacaattccacttttgtgaggtccctagaatagttaaattcatagagacagaatgtagaatggtgtttgccagaggctagagcagaggcccccagcccccaggccacagaccagtaccagtctcactcacattactgcctgagctccgcctcctgtcagatcagctgcagcattagattctcacaggaccacaaaccctactgtgaactgcacaggcaagggatctaggttgttcactccttatgagagtgatgatctgtcactgtctcccatcacccccagatgggaccatctagttgcaggaaaacaagctcagggctcccactgattctacattatggtgagctgtataattatttcattatatattacaatgtaataataatagaaacaaagtgcacaataaatgtaatgcacttgaatcatcccaaaaccatcccccaccctggtttgtggaaaaattgtcctccacaaaaccagtccttggtgccaaaaagactggggactgctgggctagagagaggggttagagggagttcgtgtttaatggggacagagttgttgtttgggaagatgaaaaatttctggaggtggatggtggtgatggttgcacaatcatgattgtacttaatgtcattgaactgtatacttaaaaatggttaagatgaggcccagtgcagtggctcacacctgtaatcccagcactttgggaggccaaggcgaatggatcacctgaggtcaggagttcgagaccagcctggccaacatgatgaaacctcgtctctactaaaaatataaaaattagctgggtgtagtggtgggcgcctgtaatcccagctacttgggagactgaggcaggagcttgaacctgggaagtggagattgcagtgagccaagactgcaccattgcactccaccctgggcaacaagagcaaaactccatctcaaattaaaaaataataataataatggttgtgatggtaaattttgtgttgtgtatattttcccacaataaaaaaataatgtgctgaagatgcttctcaaagtcttgcctgctatcctgctacttgttcatcaattgcaatttggcctgccacctaccttcttgaggcttgttcctcaaagtatggtccctggaccaggagcagcagcagttggaagcttgttagacatgcggcatcttggccagatgcgggggctcatggctgcaatcccagcactttgggaggtcgaggctggcagactgcttgagctcaggagttcaagactagcctgggcaacacagcgaaaccccatctctacaacaaatatatatatatatataaaaattagccagatgtggtggcatgtgcctgtaatcccagctacttaggaggctgaggtgggaagatggcttgagagcaggaggcagagattgcagtgagctgagatcaagccactgcactccaacctgggagacagagccagacgctgtctcaaaagaaggaaggaaggaaggaaagaaagaaagaaatgcaaatgacttaggccaggtgtggtggctcatgccactaattccagcactttgggaggccaaggtgggaagagcatttgaggccaggagtttgagaccagcatggtcaacatggtgaaatgttgtctctactaaaaatatcaaaattagctagatgcggtgatgcacacctataatcccagctactcaggaggctgaggcatgagaatcacttaaaccctggaggcagaagttgcagtgagtcaagattgtgccacggccctccagcctgggtgatagagcaatactctgcctcaaaaaaaaaaaaaatgaaaatgatttatatgcaggttaaggtttgtggagggctgttctggatcagtggtgggcaagtctgcaggcacactggaatcacctgtggagttttaaaattactgatttgattggtttagtgtggccaggcatcaggatttacaactgctcacattagaattcaagtaattctagtgtgcagccaaggttgggatcaacagatctggattatcttttcttctaacccttcagtgttttcacacttttctcatctcagtgaacacttatttcctggggcatcatttctgcttgattctttttaatcatttcaattcctttgttaaatttatctgataagattctgaattcattctctgtgtgatcttgaatttctttgagtttcttcaaaacagctattttcaattatccgtctgaaaggtcacatatttctgtctctccaagattagccccggtgccttatttagtttgtttggtgaggtcactttttcctggatggtcttgatgcttgtgtatgtttgttggtgtctaggcatagaagagttagatatttattgtagtctttgcagtttgggtttctttatattcatcattcttaggaaggctttacaggtattctaaaggacttgggtgttgtgatctacatttgtggtcactgcagctgtatctgcattaggtgctaccccaagcccagtaacactacggttcttgcagagttatagaagccttggtgtcttggataagatccagaagaattctctagattaccagacaaagactcttgttctctgcccttattttctcccaaacaaacagtctgtctctctgtgctgagctgcttggagctaggggaggggtgacacaagcacccctgtggccaccaccactgggacggtactgggtcagatcaaaagccagcacagaactgggtcttgcccaaggcttgctgtaaccacgacctacgttcgctcaaggccctagagttctctaatcagctgatggtgaagccagccagccttgtatcattcccttcggggtggcaaatcccctgagtgggtccagagatgctatccaggagctagggcctggagttggaaaccttaggaatctatctggtgctctattctactgcagctaagctagcactgaaaccacaaaaaaaataaaaataaaaaaaaaataaaaaagctcttcccactcttccctcccctttccccaggcagaggagtctctccccgtgtccaccactcaccactcccacaggtgcatagggaaggtgactgactgccaggacaccaccaatgtgcccttaaggcccaagggctcttcagtcagcttgtggtgaatgctgccaggcctgggactcacccttcagggcagtgggcttctctctgggccaggttaggtccagaagtgcagtccaagagccacggcctggaattgaggacccccagaggctgcctggtgctcttctccactgtggcaggcctgatacctaagctgcaggaccaagtcccctttattcttcttttctcaagcagaaggagtctctcctcagagccactacagctgggaatatgctgcgtcacatctgaagccagcacatctcagagtttctcacccggggcccacagcatatcctacctggctaccactgctgattattcagggctcaagggctctttagtcagcaggtgatggatcctgccaggactgggtcctccccttcaaggcagcggattcccttctggcccaggtgtgtctagaaatgtcatccaggagctagtgcctggaataggggcctcccgactctgcccagtgccctatcctgcagctgagctcgtatccaaggtgcaaaacaaagtcatctttactcttccctctcctctattcaagcagaaggaaggagtcactttcattgctgcaagctgtgctgcctgggattgggggagtactcccttagcacccgtgactagtgtctcactaggttgtgtgcccccacagtaccctggctccaagcccagcgcagcactaggacttgcctgggatttgcagcctttgtggcctagacagccttttaagtttatttaggaccccagggccatttagcccatggtggcaaggcttaccaaaactcaaattccagccactggtatgggcaatgtccctctggctaaggctggtttaaatgctccctccataggcaccagctgagttctgccctgtgctggcagcactgagttctaatgcaaagccccagcctctgcactcctcttcccacaagcacacagtttctctctctgcactaagtagccactactagaggatgggagaggggtggcatcagagattcaagactttcctttctaccctcttcagtgcctctgtcagtgatatgaatttaaaactacgtattgtgattgctaacctgatttttggttcttatgaaggtgctctttagtgtagatagttggcaaatgtggcgttcctatgaacagaacaattgctggaggcttctcttcggccatcttgctctgcatccctccttggggcttgcttgcttccttccttccttccttccttccttccttccttccttccttccttccttctttctttcttttgatggagtctcactctgttgccaggctgaaatgcagtggcgcaatctcagatcaccacaacctccgactccctggttcaagcgattctcctgcctcagcctcccaagtagctgggattacaggcacgtgccatcatgcccagctaatttttgtatttttagtagagacagggtttcaccatgttggccaggctggtctcgaactcctgacttcaagggatccgcccgtctcggcctcccagagtgttgcgattacaagcgtgagccaccacaccttgccattagccaccgcgcctggccagttctgtttgaaaagtctgaagttttgtttgaaaagtctcagctaggagtggtggctcatgcctataatcccagaaatttgggagaccaaagcgagaggatcgcttgaatccgagagttccagaccagcctgggcaacatggtgagatcccatctcttaaaataaaataaaataaaataaatagccaggtgtggtagcaagtgcctgtagtcccagctatttgggaggctgaagtggaagaatcacttgagcccaggtgatcaaggctgcagtgagctgtgatcatgctactgcactccagcctgggtgtcagagagagactgtgtctcaaaaaagaaaagtctcatcctcttggtttttttcataatctaaatgcatgcaagagagagacttcttgtgacctcattaattgagcccctcatcagggcatgaaaacatttatattgattcgttttctagataactaaaacttaccacttttgtgacaaaaaaaaaagttcaaaattgtgatcatttggatgaaaatatctaaaatgggcctggcgtggtggctcacgcctgtaatcccagcactttgggaggcccaggtgggtgggtcacctgagatcaggagtttgagacaagcctggccaacaggatgaaaccccatctctactaaaaatacaaaaattagctggacgtggtggtgggtgcctgtaatcccagctacttggaagtctgaggcaggagaatcgcttgaacccaggaagtggaggttgcagtgagccaaaataatgccactgcactccagcctgggagacagtgagactctatctcaaaaaaaaaaaaaaaggaaaatatctaaaatttatttgtgtgtccccaattctcaatagcaggtccatggctcattcaatggctcattcaattattagtgagtatgcttaggtgtcaggattcctgggactcagaaaatcaggacaagtgctgtgatcacagagctgtatcaacagtgctaattaatagagaatatttggtaacagacatgtttaatattagataaggagactgcatctggacactgaggaaatcctgggcaactttagccaagtgaactcattcacctcacttgttatgcctgagaactgagtcctttctccatgaaaacaaatacagaccatctaccatgcgacagcaactgctgaggatctagaagtataatggtgaatgaggaggctcctattcccactgagctgcaccctagtctaagagatgggcaagaaacaaatgaccaaacaggcagaggtttataatctgaggtgttagtaaaagccatgaagagaaataaagcaggatcgagagctactattttaaatcagtgcttctcaaattacccgaggtgaggaccagtttttcttttttcaatctgttttggactttttttttttttttttttttgagagatgaagtctcactctgtcgcccaggcttgagtgcgatggtgcaatcttggctcactgcatcctccgcctccctggtccaagcaattctcttgtctcagcttcccaagtagctgggacgacaggtatgcacagccatgcccagctaatttttgtattttttagtagagatggggtttcaccatgttggccaggctggttttgaactcctgacctctgggtacagagcataatatggttctaaactatttctgtttggctttaaaatcatttataacagagaaaccaaaatcgcaaggtgatagaaatagaagaagaaattttgaagcattggattaagcccaggatattaattttttcacttttctgcaaaaggaagcaagtgatgctgtattttcaaaatgtatctttaatcattcgtcagtaggcagtcccaacaatttctcctgtaaaattacaggtcaatttaagctattttgtgatggaaaaaatagattccagatctaagaatttcctatttgtgtatcttcttttgatggaaaacaaaattcaaaacattttgtcaaattcataagacatgtggtggtaagttttgacagatgtgcaatatcaagattatcacctattttattgataattatggaacatgtatgacaatctataatcatagcatctgaaggaacagtactggcaagtttctaacttctactttttccttttaatcttttgaaaaatatattgtactccttccttgcatggaaatattaagattactcaaaatactgatgatatcaaacaaatcagcaagattgtttttacattatttacatctttaaaaaggtggaaccaaggctgggtgcagtggctcacatctgtaatccaagcactttggggggccgaggcgagaggatcacttgaggtcaggagttcgataccagcctggccgacatggtgaaaccccatctctaccaaaaatacaaattagctgggcatggtgctgtgcgcctgtaatcccagccactggggaagtgagtcaggagaattgccggaacctgggagttggaggttgtagtgatccgagatcgcaccactgcactccagcctggagacagagtgagactccgtctcaaaaaaaaggtggaatcaacctattttttaatctttcagaggcgcagagtttgtttcacagttcaaacattcttgatggatggcctccttttgacaaacatcgtacctcaacatgcagtgttacatataatcagctttcatattgttacataaatataattatcttaattttaacacattagcttttatttaattcacaattcttactataatgctcatcacattgactttttttttgtagtaagatgttatggaggaagcagtatgttggtttatattccagtgtaaaatccttaatctgtgtatctattctagaaagctttcctgtcattgcggctacaccatcagaactcacccagacaggaagcttaaagtgcaaactacacttaaaccaatataatccttcagagttttaaacagctcagagctacttgtgtccataggcaattaagttgaaagaaataattatttatttgatagcatcatcttcaaatcacacatatactttaaaaactgccattggcagccatatgtggtggctcactcctgtaatcccctcattttgggaggccaaggcaggtagattgcttgcgcccaggagtttgagaccagcctggaccacatggcgaaaccctgtttctacaagaaaaaacaaaaaatacaaaaaattagccaggtgtggtggcacacaccttagccctggttactcaggaggctgaggtgggagaagttgaggctgcagtgagccatgagtgcattgctgcattccagcctgggcaacagagcaagaccctgtctcaaaaaaaaaaaaaaaaaaaaaaagactgccattggcaatatgtgtacattagtcaagttgcaaagaaaatactagcttaatttattcagttggttggtttctgtagttcctgaatacactgagctataatatcataggaaaatggtacctgagctaccttctctgtcaaagatttacccatttccaaataaaattttttttttttttttttttgagacagagtcttgctgtcgcccaggctggagtgcagtggcacgatattggctcactgctatctctgcctcccaggttcaagcaattctcctgcctcagcctcccaagtagttgggattacatgcgcccaccaccacacccagctaatttttgtatttttagtagacacggggtttcaccatgttagctgagctggtctcaaactcctgacctcaagtgatccgcccacctcagcctcccaaagtgctgagattacaggcatgagccaccgagcccggcctcaaacatcctttcttcaatcttttactaatgtctcagcaactgtacttttcaatcttagcaacccaaagtgctgcttcataagatacctgcaaattactaatgtttgtaaatgaaatatcaagtgactgcttccatcagctttttaatttgttagtctttccttaagaggatttttttttcgttttaaaaagagatgaggtctcattatgtttcccaggctgctctcaaactcctgcgttcaggtgatcctcccgcttctgcctcccaaagtgctaggatcacaggagtgagccaccgcacccagcaaaaggattattttggtattgaacttttcacgctttctatgtaaatgctgcttaagttttgatggtttcaaagcataattagccagtacagctctataaataacacatcatagtttttagcaatttgccatcaatgatcgctacaaacccaacattaatacataagtgaatatatatctgagtaaattagtatatatgattttgcttttatgctattggaaataacatctgttgttactatttggttgactatcactgctatttttggaaaaaaacaagtcttttcttgacaaaaatagtccagtaaatcttgtgtcaccatcagtaaattaaggtaaaaaatacagaaaaccaggcacagtggctcacacctgtagtcccaacactttgggaggccgagacgggcggatcacctgatgccaggagtttgagaccagcctgctcaacatggcgaaaccccgtctctactaaaaacacaaaaattagccgggcgtggtggcctgtgcccgtaatcccagctactcgggaggctgaggcaggagaatcacttgaaccagggagtcggaggttgcagttagccaagattgtgccactgcactccagcctggacgagagtgagatttcatctcaaaaaaaaaaaaaaaaagcaaaaacaaaatacagaatacaaaattgtctttacaactaataatgctaaactataaattgaaaggcaagcctaattaagggctaaaattacgataatgtaataaattatgaaaatgtatgtgtggtcctaacatgcacgactaggatgtagtgcactctacatgactcagcacctgaattcaaagccccccaaactcatctataccccggtcagtgagacaagtcactgtcttggatattgcagcaaattctagatgtgcaccttcaaaatttctgggctcaactcatggccaaatggcagcaaactgttcacagacaaactccggtctgtttgcctcacttggagtagcaccgttttaaaatggcagggattgaatcttgatagaggtgacatttgagcagaaacttgaaagaagggaggctacccgtcttattcatatttgggggaaggcagtgtaggtagtagggccagcaggtgtaaacttcttcctcaggcagaaacatgcttgtgtgctttagaagtagccaccggggcagcgtggtggccgcagagtggagaaggggcagggccacgtgggatgaggttggagacagtgggcaggggctagatgacactggctttgtagtcaagataacaacttttgggccaggcgcggtggctcacgcctgtaatcccagcacattgggaggccaaggtgggtggatcacctgaggtcaggagttcgaaaccagcctgcccaacatggtgaaaccctgtctctactaaaaatacaaaaattagccgggcatggtggcacatgcctgtaatcccagctacttgggaggccaagccacgagaatcgcttgaacccaggaggcagaggttgcagtgaaccgagatagtgccattgcactctagcctgggcaacagagtgagactctctctcaaaaacaacaaaaaaaccccttttgattttgctcggagtgggggatttgagatggggagtgacatgttcaggtaagtaatttactcccaaattaaacttcccaggattacccacaattcccctgcatatggcaaatcttgcagtagatcaggagggtctagggtcaagaggatgaagcaaacgccactgaagcggctacgttgtctggggtataaacccggggttcggccgggcatggtggctcacacctgtaatcccagcactttgggaggccaaagcgagtggatcacctaaggttgggagtttgagaccagcctgaccaacatggagaaactccgtctctactaaaaatacaaaattagcctggtgtggcggcgcatgcctgtattcccagctacttgtgaggctgaggcaagagaatcacttgaacttggaaggctgaggctgcggtgagccgagattgcaccattgaactccaacctgggaaacaagagcgaaattccatctcaaacaaaacaaaacaaaacaaaaaaacccggggttcattgtcgggtaccagagtaatttaggacacagacacacaggaggagtttaggggtggaggtttaacagttagaagagaagagaaagaaaaacagcttcctcttaaaggaagtgtgtctggagttggttcctgccagtgggtttgtggtctcgctgacttcaagaatggagccatggacctttgcagtgttagaactcttgaagatggcacggacccaaagagtgaacagcagcaagatttattgtgaagagctaaagaacaaagcatccacagcgttgatggggacccgaggcgggttactgctgctggctggggggtggccagcttttattcccttatttgtcccctcccatgttctgtttctgtcctgtcagagtgcccttttttcaatcctccccgcgattgcctacttttagactcctgccgatggttgcattttacagagcactgattggtgcattttacaatcctcttgctcactacagagtgctgattggtgcatttttacagagcactgattggtgtattttacaatcctcttactagctacagaatgctgattggtgcattttacaatcctcttctaagacagaaaagttctccaagtccccactcgacccaggaagtccagctggcttcacctctcagaaggagtctctgagcagaaaggaccagctggtggagaacgcaccgagttttatagtccagtttgaggaggtgttgtctgatttactaggcctcacagattggttccatcatgtatgacatttacaaagctctctgggaaggcttgtcgccctaccctaatcttcttatgcaaatggactttccagttgatgggggccatattatctgcttcttaccgtacacgtggctggcagagaaggcaagatggagccaccatcttgaaaaggtctagtccttagttcctgctggcattcatctgtgcagcaagctgccagcttgcttgtctatgtctgcagctcaacttttatcagctgctctttgttagaaaattatttggggctgcttttcattaaaaggaaagccctaccaaggactcccatgcccttgctatctccctaagtaattcctttttacctcctatatcaccacaagccagctttcctgggagtcccctagtttctctccaggccctaggtcacttcctatcaccactgaatctgtcagcatctttttggtgcactcaggcctcctggctctcctcctcagtatagccttgaattaatcaccaacttatcacatagtgaacagatgtagccttttccaaatcactcagggtcttcattctgaacccaaatcaccactctgtgctttaaaatatctctcccttgcagtttggtgtgggtgtaggactacattctggccaatggagcttgagcagaagtgatacatgcaactttcaagtcatgccccgtgcccgttcttttctttctgcaggagggaatacagatgaattggcaggatcaggagcagccatgttgcaccaagagaagatgaaaaaagcatatgttgcagattgcaaagtaactaggtaagcatttgagtccctaaaactattcctggtatgactggtagcggcatactagcttggacttttttgtgtcagagaaataaaccttcatctcacttaaatcagtattatttggggccactctctctgtagtaggagtgaaactagtatcctaactaatttaactgtcaaaagaaaaaaaaatatgaggcgagaaaataaggaatcaagaaacaaaagtcaagttttactcacttcatagcttggctcaaaagcaactttaaatatgtgagaaatgcaacaaatgataatcatgcatacagagaaattcctcaagtgacaaatgcttttactttcatttcctttcttgaaaattgacagagtaagattcagatgcatgtactgacactcacgtcagtaacatcggctcaggttagactttggtcgtcttatccttcgactacctaagggactcatggccagtatattttacaacccccagtgccagttactgaattctcacctgagaatgaattccctaagtctgtaatgtttcatcatcttgcaacacagataagcctgtgtttagagcaggcttttccatatgagtccctcctctttcacactggggctgagtagaaggtgattgacctgcctgagactttatcagtttggagttcatgttccatgtggtgttggagggagcaatggaggctgtgaaatcagacatcctgctttttgacagggttgtttgatgactcacccaagccattttttattctcggtgcatattctagtttcccttctcccgacagtagcctgatgcacctgtgcttgcactgtccttaagcctgttgctattgttatgtggtgtcactgagcccaacactgcgtgcgtgtgtgtgtgtgtgtgtgtgtgtgtgtgtgttgaaaggggtaggaaagtgaggatgattttcaaccattaaacccttaaggggccatcttctgaagcctggcatcatcatttttgttctcaagaacatttaagtcaaaaataacaaggttccttttgctcatcttcaaattattttacttgtttgatccaactgctaactagaaggtgaattctttctgctgtcatttcataattctagtgtattaaaaagagatgggggctgggcacggtggctcatgcctgtaatcccagcactttgggaggtcaaggtgggaggatcacttgaggccaggagttcaagaccagcctgagcaacatagcaaggcctcctacaaaaaattttaaaaattagctgggcatggtgacacccacctgtagtcccagctgcttgggaggctgaggcaggaggattgcttgagcccaggagtttaaggttgcaatgagcttcaagtttttataccttcaatcataccatttgtggcttaggaacccctaatatattacatggagggtaatgtagacaccaagaaaatgattgaaaacaatttatgcctaaatacatttgtattcttctttagagaaacctagtagacaaactaaaagctactaagcaaataaatcaaggtactgtattttacaaaatgactcaatttatgcatcatttaaagagtgtggatcccttgggaactttaaacatggttgcattagttaaacagttgcttcattcagatccctctaggaacttgggcagcacaagggaaggggggcctctgttcctactgtgtggtcctggtgatctgtgtaggtatcttcttttaccgggttaagtgataaaaacggtgtcttgtgctcttttatccaagtccaaggagcatctttgtgggtgtggggttgcaattatacctttcctccctgggctgaatccacaaagaagaagagaaaaataacatttctggagacctggccaagccctggaataaaatggttgcctgagagaaactgcaagtttgggaggcggggactcttttcattgtaaccaagagtggagtcctccatttctttttcttttttctttttctttttttttttttttttttttttttgagacggagtctcactctgtcgcctaggctggagtgcaatggctcaatctcggctctctgcaacgtctgcctcctgggttcaagctattctcctgcctcagcctctcaagtagctgggattacaggcgcttgccaccaggcccagctaattttttgtatttttagtagagataaggtttcaccatgttggccaggctggtctcgaactcttgacatcaggtgacccacccaccttggcctcccaaagtgctgggattacaggtgtgagccaccgcgcccggcctcctccatttcttttactttcctttagtcaataatggagacagtgaaggcataaaagtgttcatgctaaagaccattttgaaaatccagccacttcctgtctgttacactccagctgcctatgtcctcatcgtgtaatgggagggtcactctagaagaggaatgggccaccgactgtctaatgtgaccatcctcctgctgaacttggggaaaatgtcactttttgctctgaacccagacctaacctctggatcttgctctatgccatgctccagaaagccaccactatcaatgtgagttgccacaaaaattcaattttttgtttaatagacttaggatcttcagtgaaacttatggccatccccagtggtcacttccatctctaacatctcacgactttatgaaaataaaacaaccagctatcatcagggagagaacacagagttaggagttagtggataagggtgagggtcatgggtgagttacttcccttctcaagccccctactctctccttcagatctacatgttactgtctcaggccaggttccctgaccatcctgtttgcagtgacaactgttgccccccacctctaagtactccctaccccacttcccgttttatatctgatcattagcatttgtgatggttaattttatgtttcatcttgactgggtcatggggttcccagatacttggcaaaacgtcatttccaattctgtctatgagtggatcaccctcctcaatgggctgttgagggctttaaggcagaggaagggagaatttggccttttttttttggagacagagtctcactctgtcacccgggctggagtgcagtggtgcgatcttaactcactgcaacctctgcctcccaggttcaagcgattctcccgcctcagcctcccaaatagctgggattacaggcacatgccaccatgcccagctaatttttgtatttttagtagagatggggtttcaccatattggccaggctggtctcaaactcctgagctcaagtgatccacttgcctcggccccctaaagtgctgggattacaggcgtgagccacctcgcccagccctgaatttggtccttcttttctgccagatgacttgagctggaatatcactctctccttccctcagactgcagtttacatcatcagctcccctggttctcaggcctttggactcagattgaatgatacccctggctttccccagctgccagcttgcagatggcagatggtgggacttctcggcctccacaatcacataagccaattccttatgataactctccttctctttctctcctctcccctctctattttgagctgattattttgggaaactgcaaccacaggagaagctctgaaaacagagtggaagttaccttatcatccacattaccccaggaggacaggatgactctaagtcactggagacagttatcctttattgatggagaaggcactgacttaaatctccataacaaatcttactcttatttgccagtttttcctgagcataatcaactttccctacacccttctttttgtttcagcagacatggcatttaagtgtgagttcaaagccacctctttgaaatttaccaatttctctgggtatctccctgtatactacacgaggtatacatgttaataatcttctgtttatttgtctctttttaatctgttttttgttacagtggcccatcccaactaagaattatgaaagattgagagaaaattatctatttccctacatttatagtaatgtaaatagcatagccactctggaaaatatcagtttcttaaaaagctaaacacttggccaggcacagtggctcacatctgtaatcctaacaccttgggaggccaaggcgggcagatcacctgaggtcaggggtttgagaccaggctggccaacatgtcaaaaccccgtcactactaaaaaatacaaaaattagctgggagtgatggcaggcgccaataatcccagccattcaggaggctgaggcaggagaatggcttgaacctcggaggcggaggttgcagggggcaaagatcgcgtcactgcacttcagcctgggcggcagagcaagactctgtctcaaaaaaaaaaaaaaaaaaaataggccaggcacagtggctcaagcctgtaatcccagcactttgggaggccgaggtgggcagatcacgaggtcaggagatcgagaccatcctggctaacacggtgaaaccccctctctactaaaaatacaaaaaatcagccgggcgcagtggcaggcgcctatagtcccagctacttgggaggctgaggcaggagaatggcatgaacccgggaggcggagcttgcagtgagccgagattgcgccactgcactccagcctaggcgacagagcgagactccgtctcaaaagaaaaaaaaaaattctgatccccgaatgctcagggagactgatttgagtaataatgaaactctggtctcccacacagacagctctgcatgaatgactctttctctgtagaaattcccctatcttgataaaacagctctgtctaggcagtgagcagggtgaacccgctgggcagttacagcatgaggcagccttgtagtgatggcacagttgtgtatctcgattgtgttggtggttacaggaagctacactcgtaataagattgtatagaagtacacacgtgtgtgcttataaaaacaatgaaatctgaatcagctctgtggagcatttcaatgtcaatttcctgattttgattttgtactgtaattattcaagatgttaccaccactgaaggaggctaggtatagggtacactgggcctccctgtacactttctttgaaccttctggtgactctatcattatttcaaaatgaaaagtcaaaaaagaaattgtagttgggctctcaagcttagcgtgtggtcagtggggaaccacacgggttcaacatgcgcatcgagaagtgttatttctgttcggggcccatctaccctggctatgacatgttgttcatccacaacgattgcaaagtgttcggattttgtaaatctaaatgtcataaacactttaaaaagaagtgcaatcctcgcaaagttaggcggaccaaaccattccagaaagcagctggtaaagagcttacagtagataattcatttgaatttgacaaacatagaaatgaacttatcaaataccagcgagagctatggaataaaactattgatgcaatgaagagagttgaagagatcaaacagaaacaccaagctaaatttataatgaacagattgaagaaaaataaagagctacagaaagttcaggatatcaaagaagtcaagcaaagcatccatcttacccaagcccgtcttgcaggcaaagggaaggagttggaagagaaaatggtacagcagttacaacaggatgtggacatgaagatgcttcttaaacatttctgtaaccatttattttatggacatttgaaaatgccctttggagacttggaactgctaaattattagtttattttttacataagttcatttaaatgaaaagtgattaaaatatatctctcctacactgccatctacaaaacacaagatattacggatgttagattgcatctcagtattaaatcttcactgatatgtgtacttatgtaaatcacgaaaattctacttataactgtagaagtgaattgtggacgtaaaatggttatgtcatctggataatggactagacagcatttgtataatcactaatggcaaaaaatcatggctagtgatgtataaaataaaatattctttgcagtaaaatattcactttattaatgttatagaaggggggagacaacaaggaactaacaatttgtatgacggtgtcaaatattttgattttagtatttcctgttttggtttatttgcatcttagaagagcataatgacattgtttgatgaagcctaattatgctggactgtttcaacttggtttaacctttctgataggtagttgtggatgtttgggatgagaactgaataatctttgcctggagtgacactacactctagaatttccactttggagaatactcagttctaacttctgattcctggtagaaaaaactttatttttctagcctagcaatgatctagaagcagaggaatcctagtgccttttaaaagttattatgtggttttctgttaaaaagctcctgtttttggaaagtagaatttatggatacaacatctgctcattatttgcacataaaataaaaccatttaaaaagaaaaaaattatagttggacataaaacaatgtttaaatttaaaattacctcaggatatagacatgcatggaactaatattttatacataatcttaacttgcttttgtcagtgtatctacttgtaaatgtgtctcaccattcggttccctgtgttctgttgctgaatatggtgttatagcacttctggtatgatagccgtggactgttctctgattttctccattttttgctaatgatgtgtaactatgacatgtggacagtacccggattgcctggtttgatcactatggctacttatgtaagcatctcatggcaaatcttgtcagagcacatatagattctgtgaatctgcatggtcagagtaagcttgctctctttgggtggctggagggttatgaatatttttcacaactgtcacttcctgaacttgacctttggtatactttccagatttgctaatgcatctgctatgcttgaggcatggctttaaaataatataactttttcggccaggtgcggtggctcatgcctctaatcccagcactttgggaggctgagacaggcggatcacttgaggtcaggacttcaacaccagcctggccaacatggcgaaaccctgtctctacaaaaaatacaaaaattagcctggcatggtggtgcatgcctgtaatcccagctactcgggaggctgaggcacgagaattacttgaacccgggagatcatgccacttcactccagcctgggcaacagagcaagactgtctcaaaaaaaaaaaaaaaaaattgggccaggtgcagtggctcacgcctataatctcaacagtttggtggactgaggcagctggttcatttgagctcaggagttggagatcagcctgaccaacatgggtgaaaccccgtctctactaaaaatacaaaaattagccaggcgtggtggtgcatgcctataatcccaactacttgggaggctgaggcacgagaatctcttgaacccaggaggcgaaggttgcagtgagctgagatcgcaccactaaacttcagcctgggtgacagagtgagactccatctcaaaaaaaatttatatatatatatataaagattatatatataaaatattatgtatataatatatatataactttctcaaagcaaacgataccattttgatctcctattatgtactagttgttacatatgttatcttatttagaacttatactaatctagtgaaatatgtgtttctttccttgtagaacataaacaagagaaattatttatctgaataaatgttgttcctaagcaccgttattccagcaatgctgttgtgcttcacagccctgttaaacgtgtcttttaggcttgttttctgactctgtagcacatccttttgactgcactcagttgtggaaaattttgatctttttaagtgtaggcatctgtagtcccagctatttgggaagctctgctgggaggatcccttgagcccaggaggtagagggtacagtgagctatgatcgtgccattgcactccagcctgggtgacagagcatgaccctgtctcaacagcgtctcaacaaaacaacaacaacaacgaaaccaaaccagccaaccaaacaaaaataataaagtttagaatttgtctacctacttacctacctacctgtatctatcatcaaaagtaattcagcacaaattaaaataaggaagtatttttaacttacaggttatagaatgcatttccaatgccaccaaagatgcagagaaccctctgtattgctggagaaagtgtgaattgctactactttttggaaagcatgttgacaatatattatgtccacagcctttaaaaatgttcacaccttttaatgagtcattctacttttaggcatgtatgatatattttgaaaactttgtaacaattgacatccactgcagccacagtctaatggagggaaacggaaacccagtccaccacctacacaatctattccaaccccaatttaccataaggttttacttctgttatgactttttgcatgcattttttttaacacgttggctttcttgggagggtaaagttttttcaagaactaagtgtattttcaagaacccagcacataatagatgctctgaataaattttattcaccaattttattcactggcttaccacgagccagtcctgtacagacattaatttatttcaagacaaccctataaagtaggcttttctttcatattttataggtgaggaaacttgaggcagagagagaataagtaattagcccaaggtcatacagctagtaagaagtggggtaaggtgggaagccaggcaacctctcctgagctctaggctcttaactgcctctccagtgtgagcagacagtcacaaaatgtgccaggactgcaccagttgatatacatgttaattaaataaacatgaacccaggacgacactgataaataatcatgagaaaattagagcattctcttagtgaaacattatataatcattgacatcatgctttcaaaacttacacattagtctggataaatgtttttaacactaagcaaaaatcaggagacagaagtgtatgtgcagcatggttatacctaacacaaaatgactggaaagaaacacatcaaaagtgtcaagaagctgcaaatcagatgggcattcattcatctctccttttcactgttaatttccattttcctttaatcagcctattagtttgctactgctgctgtaacaaagttccacaaactgggtgacttaaaacaacagaaatttattctctcacaggagcccagaaatctgaaattgaagtttggataggattggttccttctggaggctgttggggagaatctgttcttgcctctcttagcttctggtggtggctgtcatccttggggtttcctggcttgtagttgtgttcctgcaatctctgctgctgtcttcacacgcccttcttccctgagcatcttcatatggccttcttgtaaggagtaagtcattggatttgggttcaaatctaacccagtataacctcatcttaactcattattctgcaaagatcctttcaccaaataaggtcacattccgaggttctgggtacacataaattttgaggggatactacttaccccagtataatgagcaatttttttctattattttatattggaaaaatgtaaacattaagaaaatagaagcttgagcctaacttctatgaagttaggtggatgattaaacagaatcagaatagttgtaactaagtgatggtacagctaaaacactttttccaacatggtcacagacataaagcagcatggcagcttagtacaaatactagatctagaaacttcagcctgggttagattcctgcctccccacctgccttgtgtgcctttgggtgaagggctcaaacattctgaaacttgtcttccactcctgtacagaaagaaagctatgggtattttagacttcaactgtttctagccagacaactggaccttccaagaggtccagcataaatcatttccatggggaagtaaactttttcctgtctttttcctctcactggggctggagagatgggagaaaggagtaaaaaatattttaaagccttgcatgttcccctgggaggccagggtgcaagaagagctcatgaatggatatttggctgaggtgtgacctggagtgttttgcataatgaagcaaggctggttgagctggcagagatccaaggaagggggctggagggatgagggagtctgtaatgggagtgaggagcaggaggtcacagccacgtggcagaagccttgcagcctgtggaggaaagcccacctaggggtgaaggtttgccaagaaattctcaggactgaaggagaaggtgcgcactgttcagcattaggctgtttgcccaggagtgccatcgcattccccagtgtgagaacggccacctcttggtcgttttctcaacctttggtgaacacttatgacatcgtggggagagatggagaaaaggactttgtgttctcatctggggcgtcatgctggggcacccgaacacagaacccatgagtgagccttgaaggggccaactgagccagaggaggttggaagagctgcgccactcctgtcccactgcaggtgggatagagttcccgctaatttcatttacatttgtacctcaaagcacgaagtggtttagctgacttctgctcttcatgaagggcccagctcacatcctttagtaataattcaaacattctgacttgcactgggcagcatgtttatcataaatgcaaggactgctactttggtgtaggaaattatttaaacgtgtaaactctcatataccaatttgcaaatcaaactcttttcaaggctttatttcaatgtcgttgttagcttttttgacttttctcattttcccactagtttgcttgattgcacattatagaaaattcaccattctcattcattctgatcccacatttagacttctctttcaaggacttgaaagaatttataaatatttgcaatacaggatgcaaattaatccttatacacacttggaaggtaccctgcaatatctttccccatctatcactcacccactgtttattgccctctgaacaatgtccagcctagttcctttcttatttcgttacatacataaaattgcttcccatccacaatctctccttagaaatgctgccctttggccgggcacgatggctcatgcctgtaatccctgtgctttgggaggccaagtagggccgatcacctgagttcaggagttcgagaccagcctgaccaacatagagaaaccccatctctacaaaaaatacaaaattacccaggcatggtggcgcatgcctgtaatcccagctactcgggaggctgaggcaggggaatcacttgaaaccaggaggcagaggttgtggtgagccgagatcgtgccattgtactccagcctgggaaacaagagtgaaactccatctcaaaaaaaaaaaagaaaaagaaaaagaaaaaaaaagaaatgccgcccttcccacagctaccctacttaccacgttactgcagactgcaccaccagtgaatgtgacccaagttgcagtaaatgaaatatctcccagaaatttggagttgggacatagggactgagcaacttatcatctctgaaggaccagactggagagaaaggggagagagacagagagagagagagagagagagagagagagagagagagaaactgcctggagttgctactcccagttctcaagttcagttgggtttcttaagatttatctctttataataaatctccctttacatgaattagcatgagtgggttttagttaattaattatactaattttttttttttttgagacggagtttcactcttgttgcccagactggagtgcaatggcacgatctcgcctcactgcaacctccacctcccgggttcaagcaaattctcctacctcagcctcccaagtagctgggattataggcatgcgccaccatgcccagctaatttttgtatttttagtagagatggggttccatcatgttggccaggctggtctcaaactcctgacatcatgtgatccacccgctttggcctcccaaagcgctgggattataggcgtgagccactgcgtccggccaaccaaataattcttcagtcagattttcagagtgagtcttcaaaacaaagtttataaaatcagtgagtacatattaaccatattaggagctaatctcattcatttttctttccttttctatttcctcttttaaaaatgtgaaatgtatcatccatacagaagagtgagcaaaatttacatatatggtttaaagcagcccctggttgaaaccatacgtatgtgttttatgcactcttctaggcctgatggtaaatatttttagctttgcaggatatatagtctctgccaaaactgctctagactgctattacagcatggaagcagctatacgaaatacgtaatggatgaacatggctgtgttccaacagaactttatttataaaaacagatactgggctgatttggcccacaggtcataatttgctgatccctggcttgaggaaaaattttaaagcaaaggtctgtataaccaccactcaagttaagacatagacacagacacatccctgtgtgtccctcctagatgagaacacttcagtcctctctagactgggcccctatcctgacacttgggatgaacattttcttgagtctttttataactttgccgtgtatgtatgcatttctaaacagtatagcttattttgccttattttttgaaaagagaaccgtatttaatgcatgcatccttttttctcctcctcttccttcttggcttgcttttttatgtttgtgaaattcacacacaagtagctgtaatttgccttattactgtacagtttttcattgtatataagacaccagaatgtttgtttgtttcttaaatatattccactgctgattaaaatttgggctgttttcagttggggagcaataatgaacaatgtagccatgaatgtttcaaatgtcctctgaaacctaaaacctattagtcaccaccttgttatttggcagaatatagaagctaacagataagggagccttggtgacacagtgaataaagattagcccccagccattcagagcagagaggagagggtggagagtaactctcaagggcagtccaagaatatgcagcactcatgtctcaacgactttcaaaggattgaaagaagtcacagcatcttctctcaccaaatgcaatttaatagaaatcaacaataaatttatatagaaaattctcaggctgggcgcgatggcttatgcctgtaatcccagcactttgggaggccaaggcaggcagatcacttgaggtcaggagttcgagaccagcctggccaacatggtgaaaccctgtctctactaaaaatacaaaattagctgggtgtggtggtgctcacctgtagtcccagctacccaggagaccgaggcaggagaactgcttgaacctgggaggcagaggttgcagtgagccaaaattgtgccattttactccagcctgggcaacagagcgagactacatctcaaaaaagaaaaaaaagagagagaaaattctcatggctgggcatggtggctcacatctgtaatcccagcactttgggaggccgaggcaggtggatcacttgagcccaggagttcaagaccagcctaggcaacatggtgaaaacccatctctatttaaaatttttaaaaaagaaggagaaaattctcatatgttcaaaaatcaagaaattgttttaagaaccccacagattaaagaataagtcctactgaaaatttaaaaaaaatttttgaatggtaatgaaataccacatatttaaatttgggggtacaactgaagtagaaaatagatgaaaatttgtagcttcatatttgcatgtaatacacagtttaaaatagactaagatagtgtattagtttgttttcatgctgctgataaagacatacctgagactgggcaatttacgaaagaaagaggttgattggacttacagttccacatggctggggaggcctcaagatcatggcagaaggcaaggaggagcaagtcacatcttatgtggatggcagcaggcaaagagagagcttatgcagggaaactctcatttttaaaaccatcagatcttgtgagacccattcactatcatgagaacagcacgagaaagtcccgtcctcataattcaatcatctctcactgggtccctcccacaacaagtgggaattatgggagctacaagatgagatttggatggggtcacagagccaaaccatatcagacagaaatgatgaaaggctgaaaattaatgagctgagtatctatctaaagaacttaaagagccacaaaataagcccaaagaatataaaataagtaaatatatagtagtaataagaaagtaagtagaaagtaagtagtagaaagataagaatagaaaacaatgaaatagaaaacaaatatactgctgggtgcggtggctcacgcctgtaatcccaacactttgggaggctgaaggccaggagttcaagaccagcctggacaacatagagagacctcacctctatttaaaaaaaaaaaaaaaaaaattagcctggtgtggtggcatgtgcctgtagtcccagctatttgggaggctgaggcgagaggattgcttgagcccaggaggtggaggctgcagtgagccatgattgtgccactgcactccagccgaagtgacagagggagatcctctctcgaaaagaaaagaaaacaagcatgcaatagagaggaatgacacaatcataaggtgattccttcatgagaataataagatggcaaaactctggaaagagagtgagaacacatataatgttatgaacgaagaaagaacattacaagccaggcacagtggctcacgcctgcaatcccagtacgttgggaagccaaagtgggcagattgcttgaggccaggagtttgagacaagcctgagcaacatagcaagactccatctctacaaaaaaaatacaaaaattaggtgggtattgtggcatgcacctgtggtcctagctacttgggaggctgaggtggaaggattgcttaagcccaggaggttaaggctgcagtgagccatgatcacaccactgcattccagcctgggtgactgagcaagattctatctcaaaaaaaaaaaaaaaaagaaaaaggaaaaggaacattacttaagcgccacagacattaaaaagatatgagtaagttgtgaacaactttttgccagttcatttgaaaaattaagttaaatggacaatttcatatagacatatattatataggaatctctatcataataagtgagtacaaagtgagtaattgtaatgctcagatctggggaggatggaatctcagggaggggagctgcatttccactgatatttggtgatctaggagcgggtgcctgagaggctgatcaatgcttttggacaaccttgcagggattgcagggagaggtgcactggcatcctggagtccagggctgccaagaaggtaaggccccgatgagcaacttttgctttgtgttagaaccctgaagggctacacgctatgaataggggtgaactagaatataacacactattgttgggactgcagctcaacctcaaatcttcccagtctctcaaattggattgctagtgttccaggctcctggcaggggcaaatttctctagagaaagatggcatcaacctaggcatcaaattatttctaaaaataattttgcaaatataaagtccagcacagaataaaaaacaacaaggcagccaggcacagtggctcatgcctgtaatcccagcgctttggggggccgaggcaggtgatcacttgatgtcaggagttcgagaccagcctggccaacatggtgaaaccctgcctctattaaaaatacaaaaaataggcgtgctggcgcaggcttataatcccagttactcgagagactgaggcaggcgaattgcttaaacctgggaggtggagattgcagtgagccaagatcccaccactgcactccagcctgggctacagagtgagactccatctaaaaaaagaaaataaaagagaagaaaaaagacagccaggccacatgtggagacaaaatactatatgagcaaaaaagagcagaactagcaaaaattgaaacagacctaaaggaactccagatactggagttagcagacaagacttgcttatgatattcaagattaaaagcaagacataatttcagcagagatctgaaaactacaaaaaagacccactacaagaaaggattatttcaggctaatctcactcatgaaaatagttgtaaaaatcctatgcaaaatatttacaaatagaatccaacaatatgcaaataggcaataagtaatgatcaagttgggtgtttttttttccccaggaaaagaagatttatttagcactcaaaaatcaaccattgtaattatctacattaccagaacagaggagaaaaaaatgtaaaatcacgtcaaaagatgtagaaaaaaatttgattacattcggtatccattcggtatccatttgtcatcaatggaaaaaataaaaagaaacttccttatctgataatgagcatctacaaaaagcctattgtgaacaccataattaatagttaaatgttgaaaattttcttttgatttggggaatagggcaagtatgttggctaagtcctcttggaagcagacgtcaagatggatttagaagtgcaatggatttattggaggcaattcccatgaaagctcaagaggggaggcagcaagagagggcagagaaagcttcagacctaaatgctgatctgacccctgtgcaaggagaagggaaggaagaggataaggtaggaagaacagcaaattacactgcagctctgagaatatcttgactagccgaatggggagctgtggctcaaagatttcccatggaggagtcccacaccggccaaaaagatgagtccttgcatcactgccaagcccattaattgattgaaggctgctctggaaatctatggcccagctcaaaagctgaagaagatgctgaaggtgcctgcagccagaagctgtgagccaactgcactctccaaggcaggttttttttttttttttttttttttgagatggagtctcactctcacccaggctggagtgcagtggcatgatctcgactcactgcaacctgcacctcccaggttcaagcaattcttctgcctcagcctctctagtagctgggactacaggcgtgtgctaccacgcatggctaatttttgtattttttgtagaaatggggtttcaccatgttggccaggctggtctcaaactcctgagctcaggtgatccaactgccccagcttcccaaaatgctggaattacaggcatgagccaccgcacctggcttctgttttgaaggaagatatgagagactcacctccacatctgccacaagaatattcaatatcaccacttctattcaatattgtactagaggtcccagtcagggaataaagaatagaaaaatacagagaataaatttagaaatttagaaagaaacactactgatgttatttgaagatttagaaagaaatgtatacatttagaaactctactgacgttatttgaaagttatatggctgtgtatatacaatattctaaaggaatatataaataagcatttagaataagtgagttaagcaattttgttgcatataatgtctacgtaaaaaggcaactgtggcctagtgcagtggctcacgcctgtaatcccagcactttgggaggccaacgtgggaggatcacaaggtcaggagttcgagacgagcctgaccaacatggtgaaaccctgtctctactaaaaataaaaaaattaaccgggcatggtgccacacacctgtaatcccagctactcaggaggctgaggcaggagaatcgcttgaacctgggaggcggaggttgcagtgagccaagatggcaccactgcactccagcctgggcaacagagtgagactccgtcaaaaaaaaaagtcacttgcatccttaaatagcagtagcatagaaaaataaggtatcaggccaagtgcactggttcatgcctataattccagcactttgggaggttgaggcaggaggatggcttgaccccaggagatcaagaccaacctaagctaggcaacataggtaagaccctgtctcaacaaaaaataaaaatatcgaccaggcatggtggcacatgcctgtagtcccagctacttagaaggctgaggtggaaggattgcttgagcccaggaggtcgaggttgaaataagccatgctggtaccacttcactccagccttggtgacagagagagaccctgtctaaaacaaacaaacaaaaatcaggtttcaagaaatacaatttaaaaatgatgcgcaagagctttacacagagaactgtaatgcattattaagagaaatacacacacccactcccgcaaataaaagaagaaacaaaccatgttcacaaattgttagaataaatattgcaaaaatgtcacttctctgtattgatctatggattctatttacattttacaattttttttttagagacaaggtgatttaaaattaaacaggttgtacacattttcatgtttcttagctactggatatcaccttttataaagcgcatgttccaattgcttgcctatttttccctttattgtctgtctttttcttattgaattacagaagttctatgtatcttccaagtacaagtccaagtccttctcactatgtgtattacaaatatctttttccagtttgtggcttgtttttcactctcttaaggaaagattttaacttttttctttatgttaaatgcattgtgtgtcttgttgaagtaatccttccctattccaagaacatgagggtattatcttttattatcctctacaaactttattgtttcaccttgcacatttaagtctatgatcaacctgttattaattttagcatacggtgtgaggtaaggtcaagttttattttctttatatgagggttcaatgtaaactgggtattctgggtcaggtgtggtggctcacacctgtaatcccagcactttgggaggctgaggcgagtggattacttgaggtcaggagttcaagaccagcctcgccaacagggtgaaaccccgtgtctacaataatacaaaaattagcctggcgtggtggcacgtgcctataatcccagctgcttgggaggctgaggcaggagaattgcttgaacccaggagttggaggttgcagtgagctgagatagcgccattgcactctggcctgggcaacagagtgagatctatatctatgtctatatctatatctatggcattctgtatatgaatgttgtaataagttctcttatctagtaaagtgtgtctgtccactttattcctcaagaataccttggctattcttggtccttcacatttccatataaaattttagaaccagtttattaaattccactaagtaagagaaagaaaaaaaaacctgttggagtttttatgagaattatattgggtgtggtagcctgtgcctatactcctagctatttgggaggctgaggcaggaggattgcttgagcccaggaggttgaggctgcagtgagccatgatcatgccactgcactccaacctgggtgatagggaggtcaaggctacagtgagctgtgattgccccactgcactccagcctagagtgagtgccagagtgagaaccggtctcaaaaaacaaattaaaaaaagtaaaacaactaaaaagaatacaacatcacttgcatagtagtccttccatttttgcactacctgagcttagtcatgaggaaacatcagacaaacaggaattgggagatatttacaaaggaactgtatttttctcaaacgcccgtatgatgaaagataaataaaagctgaggaattgtgccattataaagaagactaaagacacattagaataaaatgcattgagtgatcctggattggatttcataccagaaaacataaaaattgctatagaggacatttttgagacaattggtaaaattcaaatacgatctatacattggataatagtgttgtttcaatgttaaatttcctgattttggtaactgtactgtggttatataaataaatgtccttgttcttgggaaataaacatacctaatcatttaggattaaggaacctgatgtctgaaatttagccttaaatgttcagaaatatagaatacgtaatatgaattacataaaataaatatagatttatagatagataaaacaaatgaggcaaatgtttttcatagagtagattgtttaaagacactgtactaggctttaatgtaacgtataaattaacattgatttatgcaaaacaaggctgtgaaagcccacacagcttagctgttcaatatacctgatctcaggtatatgaaagaaagaaggcagacctccctcacttcctttgcaaatttccataggccctttctatggcaggataccaactgccttcttagacattctagaggtccagaggtctctcccaattcattagtctcactgtgaattgtagaaagcatattacagagggtcaataaactttggccaatggtagtgatatttgtaagcaataaaagaaggttgggttgatcagtccgttatagaaatcatatttgataacagtaatcttgctttgtaaatctggcttaatagtttcgagccacaatttaaggctgttcatttatatcatcacctgaagtttagaagataccatggcccacataaaggtaatcattaatatcatctttctgtacatgttcttgtcagagcctgccacgtccatgtcccatttagccttcaaactcacagatgcagattctctttctcagctgaagcacaaggaaaaacagttcagagttatattttaaactaatggtctattgactcctagtaccagttaataggctgggctatctctacttttgctggagaataaaatagtatgaagttaactataatattttcttcttacagcaacaacaaaattctgtaagaaagatcattcccacccaatatggtgctctttaaatggtccacagcttaaaatgtatatgaggtcatatacgcttatatttgcctaaagaaattctggagaatagacccaaaactaataaataaaagtaattaattacctgtgagggctggagagatgaaaattctagagataaaggattttaaaaagtattccctggaagacattttctatttttaaattcatgagctatgtgaatatgttaacgattgagaaagaaaaatccccagctatctaggcagacttcccaaagaggcacctttgactttggaatcatttagctgtagttttctgccctgaaagcctcttttgttatccccggtccatcctgcaggtgtggttgataacagatgtcaaagaataggtgaaattttatgaggttaagtgcaaataatgaatatgaccctctttgcggttcttcctcaatcttctattcaaacataaactcagttcatgaagaatgaagtttgtggcattgctcaagaaaggcaggattcaataaaatctttttagggccaaatggaattttttcaactttaatgattttttctttaattatgttaaaggaagctccagaatctcttttaaaaaagtatttgtagcctgggcaacatggcaaaaccccatctctacaaagaatataaaatattatccagcagtggtagcatgcacctgtagtcccagttacccaggaggctgaggtgggaggatcatctgagcccaggaggtcaaggctgcagtgagccactgcactccagtctgggcgagagcgtgagacctatctcaaaaaagaaatcaaactattttttgtatcgttttgctgattacaatggtaaaatatgtttgttgtagaaactttggaatacataaaaattaaagaggactagttcgttaatacataagtcatagtttaacagggtctaagttagccttccatactttgcccatttacaaagtaaggcataaatttcaattcttttgtaatgtgatggtttatgttttctttagataggatgtgatgtaccaagctgagtgttgggaggaactacagcctctcttttgaaatggaagatcctcggcccaagctataaacatgttagtccaaaattcatctggaattttgttgtttgggatgcaaaacacaatattcccatagaaacaatataaaaattatggctagattctaaggcaaggcaacagatgtccatggaatccagcgactcagagcaccaactgtccaactgtgcttcattttcacagaaaaagggaggctagaacatgtctttacctcaaaaaaagcaaaaacaaagtttatgcaaaaagtattttgttatactgatatgataaatatttaatgagacaaatttttatcaattatttacctaaagtgactttatttcttatttactccattactagcaggtttataagcttttcctctcgcctttattcacaatttctattctgcctttactatttttaatggtttccccattccccagttaactccttggcaaagacagaggatgagtgaaaagcttgtggcctgtagactagatatcagaattgatccacaggaaagaacctcttttcagaagccatctttaccttggggtttgataaagaacataaaagcctcaattggtgctatttaatatttgttccgagaccggtatttgcatttagggtgaaatgacttgatgcacattgtttacagctaactctgaagttcaggggaaggggaataatccactgagtcagaaggcaaatataccagactgatcatgagtaaaacaaagccctggtgatcagctcttcctcttattcactatctgtatctagtgaaaatggtcgcatattttcaagtggatttttaaaagctattctcaatgcttttaaaggttttacaacctcaggggaacaatgcatgcaattgaaccacacaataaacagtaaacaccaattgccccccacaatgaaaagctaatggtctttgagaatactctacaacagaatccacttagcagctactagtctcctgctaatggtcaattcactttcggcaataagaacccaggcaaacggcctcataaattttaaagaacaaagggtacaataaatggactgcaaatcgccgcattctctgtaagcagcactctaaggagtgaaatttccaattgctaatggccagtatattggacaagtggagattttcctactgagggaccagagaagatgacaaaatataatggttttcacaaagaggactagaagctggggaaattaagtccttgggtctgtagcacagtttgagctgtgaaagtcgttatgaccagaagattgtctagccttctctgcggtagcctgggaagctgctatcagattgcttgctgtttgctttaatagtgtatcgagaccagaagcacacacactgctagaaccaaaaatcctggatagatttaacaaaatccaccaacctttcagggaggatacataaaaacatccttttttgcattttgatcttgtgggtacttcagaaatgccatttgattcatgatggtaagtagcctaaacgaatgcaatgatatgtgaattgattaaattctgtatcaaaagggatctctaagaaaggaataataagaacaggaaagtggaaatattgtggaaacatttttgcaatagactgaatacgttttcccaaaattctttcctgcctgcctgcctgcctgcctgcctgccttccttccttccttccttccttccttccttccttccttccttccttccttccttccttcctgtcaggcctctgagcccaagctaagccatcatatcccctgtgacctgcacatacacatccagatagccggttcctgccttaactgatgacattccaccacaaaagaagtgaaaatggcctgttcctgccttaactgatgacattatcttgtgaaagtccttctcctggctcatcctggctcaaaagctcccctactgagcaccttgtgacccccacccctgcccgccagagaacaaccccctttgactgtaattttcctttacctacccaaatcctataaaatggccccacccctatctcccttcgcggactcagcccacctgcacccaggtgaaataaacagccttgttgctcacacgaagcctgtttggtggtctcttcacacggacgtgcatgaaacttccttccttccttctttctttctttctttttttgacagtgtctcactctattgcccaggccggagtgcagtggcatgaccttggctcactgcaacctctgcctcctgagttcaagcaattctcatgcctcagccttcctagtagctgggattacaggcacctgccaccgtgcccagctaattttgtatttttagtagagatggggttttaccatgttggccaggctgctctcaaactcctgatctcaggcgatccgcttgcctcagcctcccaaagtgctgggattacagaccaccatggccagcctgcccccaaattcatatgttgaaatccttccccctaaggtgataagattaggagatggggcctttgggaggtgattagttcatgagggtagacccctcatgaatagtattagtgcccttattataaaagggatcccagagaactctcttgctttctctctaccatatgaagatataatgaaaagactgcagtctgttacccagaagagcactcatcagaacccagtcacgctggcaccttgatgttgaacttccagactccaaaactatgagaaataaatgtctgctgtttatcaaccaccctgtttatagtactttgttatagtagcctgaattgactaagacaattatggagcttgaaagaactgtgagctcctcttatggtcaaaggagctgaaacttaggctttgtcctgaaatttccctctttttttccccctgaatcattaattattaattttccctttctttgatcctcggttaaaaaaaaatcctctcttaaccctatattctgctccagctgtgtctcatttttctgttgtcctttatatcaaaactctccccaaagacttgttatgctttgtcttgacttcctctccttttatctctcttgaacctgcttcactcagacatctgacccaaaactccaccaaaatcgcccttgtcaaatccactaggcaatcttcagtcttcattttattggcaagtcaagagcatttcaaccattggatcactgcctgtttcctgaactgctttcttcacttggctttcatgatagctaatacagagtccaggtagatggcaagtgctttggtttgaaagtatcccctggaagatggagtgttgcaaacttcattgccactgtggtaatgttaaaaggtggggctttctcgaggtgattgggtcatgagggtggagccctcatggtggattaatgccattattgtgggtgtttggcccccttttcctttctgtctctctcacactcttcctctctcactctcaccctttctcacccttccatcttctgccctgccaagggacgactcttcagatgccagtaccacagtcttggacttaccagcttccaaaactgtgagacacaaatttcttttaaaagtaaattacccagtcttgagtattctaagacaaccactaatgactcctgcttccttttccattaagaagagctctttttggggtatagcagcaataggtcttgcatttcccaaacctgtttctccctaggtaggggtaacagaatttgaagtgaggtggttaagaagtgtcttctttactcttccccatctggctccaagtggatgcccagggtgactttggaagcctctgttagcctgggtacctgaataactgtgtggagcagagccccttgtggtgtgtcagatgaacttcagatgtacagcacagcatcagtttctcctgctcattgatgagcatctgcttcagtcttccttattggcaaaccagctgtctttgcttctcagtccacatagtaggcagcctacaaggtagctaactgtagcacctggggtcacatgtttcagccccaaaacatttaatgactgactgaattcctaattctcagaaaagaatctgcttggtccacataagttcaggtgtctacctctggtccaaccagctatgaccagggagatgtccctgaaatatcatcttggtggttggagatctgctctgtgaccttgtgcatcagaacatggggagaggtttcaggagagtttctgtgtgagtgggaaaactattaagtgcctactctacatcccaatatttcactgtttttccctttctctagccccatctcccatccctccacgctccaccccatccactctaaatactcttttactttcttgaatcctcttggtatgtcctgcaactccagtagtcttctctggtcaagtttgcatattttcctatattcagtgcctcagagtcagatcttggaatcctctgacatctccagaccacttgttttctgtccttgtataaagtcatcagctcctttgaggtctacatcatttggctatgcctttctctctcttctctttctgctatctaaccacctcccaggtatccattttcatgcatcaaatattttaccacctgtctcaaagtttcctcttcaatttcagctcctgttctcttccgggtgacttcagctttcacatggcaggtacatcccacaccttgcattctccatgttttgaacgcctctactttatgaccttcttgtcctctccattttagtctaccacatccatggccacacttaaactttattctcatctgaaattgtaccttggaaatcttgaacatcccagtctctaatgacaggtttctgattttgaaattcttgcccttggttcctctcgacagaactgttttcggttttgctctgctccactcttgatttctttccttacccactttagactccatgaactatcatttcaaccactctctttttcaataccctcagctccctttccccttcttccattttaccagctttgaaaatccccaaatctggatgaatacaagaagctgtcctcttcccaccaacccaaatatatgactttatagcagattttttgcctacttaataccccacagaggctctctaatgcctcaggataatgttccaatttaacatggcagcaaagctcctgaagacctggcctctatttatggctccaacttcgtccctcacttcgttttctccactccaactgtactgagctctctcctgtatcttccacacccaaatctctgcactggctttcatacctacctggaaatcttttctcccagctaatgctaagtcttccttcagttcttaacatacacataattttctccttagtctttctcctgaggtttctataactctttctcaaaaatctgcctttagtcgcagtctctgcatcatagagcttgtcacttttatgcaatggtttggttttttcatagactcttgaggaacaaagaggcacggtaccttgtctgttcatcatattcacatttccagcacagattctggatcaaagtaattttttttttcagggtctcactctatcacccaggctggagtgcagtggcgtgatctcagctccctctgccccccaggctccaccccctgggctcaagcgattctctctcctcagcctcctgagtagctgggattacaggcatgcaccacaacacccagctaatttttgtatttgtagtagagatggggttttgccatgctggccagattgttctcgaactcctgacttcaagtgatccactcaccttggcctcccaaagtgctgggattacaggtgtgaaccactgcacccagcccaaagtgagtctttttttttttttttttgagatggaatctcgctctattgcccaggctggagtgcaatggcatgatcttggctcactgcaacctctgcctcccaggttcaagcaattctcctgcctcagcctcccgagtagctgggattacaggcatgcaccaccatgcctggctaattttgtattttttgtagaggtggggtttctccatgttagccaggatggtcttgatctcctgacctcgtgatccacccaccttggcctcccagagtgctgggattacaggtgtgagccactgcgcctggcctccaaagtaagtcttaatgaatattacatagtattcaaatgaatgaatgggtgtagaaggtaggaagataaggttccctcaatgttttttaaagcaatatctgacattgaaaaaattgtacattattattttttattttctctttccttttttttttttttttttttttaatgcagtcttactctatcacccagcctggagtgcagtggtgtgatctcagctcactgcattctcaaccttccaggttcaagtgatcctcccacctcagcctcccaagtagctgggtctactggtgtgcaccatcatgcctggctaattttttttctttttgtctttttagaaacaggggtttcaccatgtggtccaggctggtctgaaactccagagctcaagtgatctgcctgcctcagcctcccaaagtgctgggattacaggcatgagccactgcacccggccattattttcttcttctttttttttttttgagacagaggttcgcttttgtcacccaggctggagtgcaatggtgcgatcttggctcactgcaacttctgcctcccaggtttaagcgaatctcctgcctcagcctcccaagtagctgggattacaggtgcttgtcaccatgcccagctaatttttgtatttttagtagagacggggtttcaccatgttggtcaggctgttgttgaactcctgatctccagtgatccgcctgcctcagcctcccaaagtgctgggattacaggcatgggccactgcacctggcccattattttcttaatatttatgttttgcttcctttcagtagaacagacacacaagaagtaattcttagaaaaatgctgatgagcacctggaggctctgatgtccacactagatgccttagaaaaaagaactatagccattgctattcccatcattgtgctgcacagaggaatgtaggtatccctgggctttacatgtaagggcaaacaggacgtgataaccctccaggatgtgtttgagaagggacatgtgccttgtggagccaagcactccttcctatgctccctccaacaagtttaagaaatatttatttatttatttattttttgagacggagtcttgctctgtcacccaggctggagtgcaatcgtacaatctcggctcagtgcaagctctgcctcccaggttaaattctcctgcctcagcctcccgagtagctgggattacaggtgcccaccaccacgcctggctaattttttgtattttttttagtagagatgggggtttcactatgttggccaggttggtctcgaactcctgacctcatgatccacccgcctcagcctcccaaagtgctgggattacaggcgtgagccaccgcacctggccttattgatttattaatttgttgagcacaggcgagttggacgctaagaatatcaacatagaaaaagcacagaacctgcttcatgggacttattgactagaaacagatgatcagatgagaaaataggcaattacaacatgatgtcatgtgctgtgatagaggtaagcacaggcttccatgggtgccaaggaggaatctctaacccagcctgcaatggtaagggaaagttccccagacgtaatggcaccagaacttagtcttgaaagaacaggaattacagaggagaagtggagatggttgagggcattcccatcaaaaacccagagagggccgaatgtggtggcacctatattttagggtatatcatatatgataagttgtaaagaaaagcaagagaatgattagcataaaatttagagtagcagcctcttttttttttttttttttttgtagagataagagtcttgctatgttatccaggctggtctcaaactcctggcttcaagtgatcctcctgccttggcctcccaaagtgctgggatcacaggtataagccattgcacctggcccagttactatttttaaagtaagaagttggtagaaaactggtacaacttaggacttccatttcctggtgacaattgtccttatcacctcataggtctttgaggaaggttagatgtgatcaacaatgatgtcctgttctgactaaacgttaattgtctagcttcagaggcagagcctgagttaggtccctttctctgtggtcatgagaacctgactcagtgacgttgactcacagaatgtgagcttcatcactagctcttatcaccttgggtctagagggtcagaaatggaagctctcctgcaaaggggggcattgagagttcaagtttctcactagtccaggcaggagtgggtacatgtttactgcagaacagagtaggtgtgacctggcataacagcctaggggtcttcaaagaaagctgggtcttatcttatctcgctagaggaaagccagtctgagtaagggggtggaagagcggtggaccatctagggatccaacaaagtcgcatttcaaagccggatgtgatgccaggcacagtggctcacgcctgttaatcccagcactttgggaggccaggatgagcagatcacttgaggtcaggagtttgagaccagcctgcccaacatggcaaaaccccatctctactaaaaatacaaaaattagccaggcatggtggctggtgcctgtaaccccagctacttgggagggtgaggcagaagaatcatttgaaccccagaagaagaggtgggggttgcagtgagccaagatcgcgccactgttctccagcctaggggacaaagtgagactttgtctcaaaaaataaataaataaaaaataaaaaagctgaatgtgttttggcagggtctaatcactcattcctctaagaggcatcagaggcccattatcaagacaggtggaaagtgctttgaaacatgtttaataaattacttatccagcacttagctagtccctgctacatgccaaggctctttacaaatattagcccgtgtaatcctcataacaaacctatgaggtgggtaatattattatcctcatttcaagaggaaggtatttgcctgaggggatacagtgaatatgggagatggaacgtgggcccagaagcccagctccagatccaggttcatcaccaccatgctgagctgcctggttggtctctagaagctctcacaatacctgtggctgacccacagctccagtttgcatgggcagagggaaaggattagcccagcttcctgggccagtgtgtaggtgctggcttgtctttgtagaatttaactattggctaggagccaatggcaggatttgcatgacccaaagaccagcccaaaatgaatgacgctggtggcctttgtgctaggaggactgtctcgccttcttagtacagactttctacaacagcgctggggacaaaatcacaggaaagtacaagaagcagggtggaaacgtgcattcaaatgataaactggctgaaggatctagtgagtctgctagaagagcaagggtcaagaacagcttgcagccttgaccatcgtgggcaagtctttccatgtcctcgcctgtgaaatgaaaagttacaccaggagttcccaagcatggctctgcctctgaattccctggagagagagaggaaaaaatataggcttctcatcccaacctgtgcaattctgacttatatagaaaactagacacaattctggagtagtttattccccaatgattctagattatcaagtttttagcatgtaggaggctcataagaaatatagagttctgcattactgtgaggtttggcttcatttcagaatttaaaagagcaggacacggtggctcacaactgtaatcccaacactttgggaggccaaggcaggcagatcgctagagttcaggagtttgaggccaacctgggcaatatatcataacctcgcctctactaaaaaaaattaaaaactagctgattttggtggctgacgcttatggtcccagctacccaagagactgaggtggaaggacggcttgagcctgggaggttgaggctgcaataagctgtgatctcaccactgcactctaacatgggcaacagagcaaggccctatctaaaaaaaaaaaagaaaaaagaaaaagaaaaagaattcctaccaaaatgccaaaaactccaatatgtataggagtcgacgtgacaaagttggttagggacaaataaaaacctagatcccccttctcttataaaaataaatgatttaaaattttattttttattttttgtatttttttgagacagagtcttgctctgtcgcccaggctggagtgcagtggtggaatctcggctcactgcaacctctgcctcctgggttccggtgattcccccgcctcagcctcccaagtagctgggatgcccctgccatcccatctggctaattttttttgtatttttagtagagacaggatttcaccatgttggccaggctggtcttgaactcctgacctcaggtgatccacctgccttggcttcccaaagtgctgggattacaggcatgagccactgtgcctggccctgatttaaaattttcaatgtgaaggaaaagcccttagagcagacaggatgccagacactgcatccccgtctttgaactctataacaactctgtgttatgttcagcctcttcccattgtataggtgaaaagtgaaattcggaaaaaatgactatttgctaatgatcgcaaagctcataaagttctgccagacactggatttatacatttccataaaagctatccatgtgttcattcaggtatttgcttatttgcaaataaataaatattcgtttattcagcaaatatttactgagtcctatgcttttcttaacactgagaacacaaaaatatacagactgcactatatacaagtataaggatatcacatgtaccccccaaatatagacaactattatttatcaatttaaaaaatttaggcagaataaaatattcatgccaaataataagtttagcctcttaatccatccttccttccctttcttgcttgctttcttgctttcttttatttctttttatttatttatttatttttgagacagtttcgctctgtcacccaggctggagtgcagtggcatgatctctgcttatgtaacctctgcctcccgggttcaagcaattctcctgtctcagcctcccaagtagctgggactacaggtgcccaccaccatgctcagctaatttttgtatttttaatagagacggggtttcatatattggccaggctggtgttaaactcctgaccttgtgatccacccacctcggcctcccaaagtgctgggattacaggtgtgagccacagtgctcggcctatttctttttttttgagacagggtctcactccattgcccaggctggagtgtagtggcgcatactctgctcactgcaacctccgcctcctgggctcaagcaatcctcccacctcagcctcctgagtagctgggactacaggcttgttccaccattcccggctaatttttgcattttttgtagagacagggtttctccatgttggccaggctggtctcaaactattggcctcaagcgatccacctgcctcagcctcccaaagtgctcggactacaggtgtgagccaccatgcctggctagctcatttcaaaatattcccagtctttccaaaattaggaagccctgaggggtatagaaaagatccaaactccccacaaattaactttgataaatccttgactgtctactactaataatcttatttttgctaagaacatcttttctcagtccacaaccagaaaacattcctttgacaacttttatggctattaatattgaaggaaatattgaaaaagagtcctagaataagtaaaattcagttttaagaaaaagagagaggcaattataacggacattcatgcttcataaaacttttcttttattattattattattattattattattactattattattatttttgcgacagagtcttgctctgtcgcccaggctgtaatgaaagcatcacaatcttggctcactgcaaactctacctgcagggttcaagtgatgatggtgcttcagcctcctaagtagctggaatttacaggtgtgtgcctccacgccaggctaatttttatgtttttagtagagacagggtttcactgtgttggccaggctggtctcgaactcctgacctcaagtgatccccctgcctccgcctcccaaagtgctgggattacgggcgtgagccactgtgcctgtccccagcacaaaaagttctgatagctccatgttcctttataatcttgaacgataatacataattttacaaaactgtcattagtgtgcatacaatttggtgatattttaaatgaaacacattttcaccagcagttttctaaggtgtggcagaatacgcaagtgttttgcttttgatactatacaatgttgttgggcacaatcacttaaaaaacatactgacccatgaagtttagctcttggagtttccttagagaatattcggaccaaatgtactattgtgtgcttgaggaagctgaagactagaacttgcccacacctcttgtggggctcattccctgcacactgcttctgaagagagcatgagagcctggtgagtttgacttccctgaactaggcctgaagctaaaggtatggtatggagacaaggtaaggaatttcagtggtgagagttccaggatcatccatgctgtggctctgcagctcttgctgcaaattcccagttcatttagataagaaaacaggagtggaacaggtgagatgtccacacagggtcaggatccatggcagaagcagaatatctttgtgcaccttttcctgggtgcccttcaaggtatgtaacagttgttagatgaagggagaagttcttcgttggtcaggaacttcattctctctaacctcaactgtatctgaagactctcaacatcatggaattgtagttagaggagatgttggaatcatggcgggaggagcaggtagctctgtggtttccaaaagccactgtagaggatcaatcagcaggtttggggtggagccccagaatctagagtctaactttcaaaagctctttaagtgattctgatgagaaactggttaggaaaacagtgaagtagaccaccctctcacctaggcagggagtcacttccattcagtggaaagcccatgaggatgtgaggaggacttaaatatttccaatgacagagaactcaagtttctgaaacttactcccagtgggaattcccccaccccatatgaaaaaaaaaaaatttcctttcattccagtttatctatggccagtagttgtttgaaaggaatttatacctctgcaaagaagtcactaaaaactgtcttacaaatactaaaatctactccttgaatcaatttagcaaaatgctttgacctgataactccatttttgggatattatcctaaggaaataatcaaaaatatttttaaaaagaaatcctttatgaacagttttgtttattgcaccattattcatactagagcaaagaacaacaatgacagctcaattagagacctgttaggtaattggagaatggttaaataatctttggcatgtcaactcaatgaaatattgtgtgaccacttaaaaggatttgacagagtttgaaactatgtgaaaaattgcttctgttaccctaagtgagccatgattgcatcactgcactccatcctgagtggcagagcaagaccctgtttcaaaaaataaataaataaaataaaatacaataattaaaaagcaagacataaatttgagaccaggtccagtggctcacacctgcaatcccagcactttgggagctgaggtaggaggatcatttgaggccaggagttcaagaccagcctgggaaacatactaagaccccctcaccgtctctatttaaaaaaaaaaaaaaaacaaaaaaaaaaacgggtgtggtggtttatgcctatagtcccagctactcaggaggctgagatgggaggattgcttgagaccaagagttacaggttacagtgagctctggttgcaccactgcactccagcctgggtgacaaagtgagactctgtctcataaagaaactttaaaaatcaccaagatgatgagactttaatagaactttagagtattccatttagaaatgatgtcctagctgggcacagtggctcacgcctataatcccagcactttgggaggcagaggcgggcagatccagaggtcaggagtttgataccagcctggccaacatggtgaaaccccatctctactaaaaatacaaaaattagcagggcatggtggcacacgcctataatcccagctactcaagaggctgaggcaggagtattgcttgaacctgggaggcagaggttgcagtgagccgagatcgcgccactgcactccatcctgggcgacagagtgagactctgtttcaaaaaaaaaaaacaaaaaaccagaaatgatgtcctagacaatacatgtacactgagatgagaaaatcatgaaaatgccaaagtgttagaagagaagataatctagatcagtggatcctgatttgactgcccattggaattacctggtgagtggttataaatcttgatgcctggccacacctaaacaatcaaatccatagaaatttttaaataaaaaaaaaatttgaacaaaacatatgatagaaattttgtaaaataaatacaactccataaaggaaggaagttcttccttcctttctttcaatttctttcctttgaaaagaaatcaaaatataaaagtggttgatttgaatgacagggatgtaggcaattaatttttatcttcaagggcttttttcccaagtttatttgctaaccattgctcagataataaaaattatataacaagcagttaataaaatgtttcattggctcagtattgccatgtagaaaaattccaactttaataaaatataccttaatttattatttaattaagggtgtggtatgagcccttccagtgaccagcttccgctgaaactcacatcctaccctctcaaccttgctgatctgctctctgtgctttcttgctcctctcgtttcttttgttttgttttgtgtgttttgttgttgttgttgttgttgttttgcttgtttttttttttttttttttgagacagagtctcgctctgttgcccaggctggagtgcagtggtgccatctcagctcactgcaacctccgcctcccgggttaagcaactcttgtgcctcagcctcccgagtagctgagactataggcacctgccatgacacccagctaatttaaaaaatatctttagtaaagacaagattttgccatgttggccaggctggtctcgaactcctggcctcaagtgatccacctgcctcggcctctcaaagtgctgggattacaggtgtgagcccccatgcctggccaggaacattgttaaaagcccagcttacagagcccaggatcacagagccagcctaagattgaagctagaccagggcaacagagaaccccttcctaacccccaccatgagcctaacagcatgtaccaagcaataatagtctacaactaggggaaggacaaaggcaagcagaaaggtcctctctgtggctcagttggcagagatagctacaagatgaaggtggggcaagaatatcccctcacctcccacctgaatcacaacacaagcgaggagaatttgaagctggtttgtgcactgaaggaaaccatagcaacaacaaacccaaacctactcaactcctgactagactgattcaaccctccacattaatgacctgtcataaaaggtgtgcccatttcagacataaataccacttacttcagtgtctactgtcctacaaatgatgccaggtattcaatacaaagttatgacatatcaaggaaacattaaaaacaaaaagcaacaaacaaaatcccaagagataaagcaatcaatagcaagagattgatctatgagcaacattttgaaactatcaagcaaggaattaaaaataattaggattaatggattaaaatatctgataattaaaaatgaacaacaaacatgaaccgatgggtaatttcagcaaagagatggaaattataagaaagtcaagaaggaacatcttcaaaacagcaaacaaggaactccaaaaattcactactccattaaagcaatgagaacattgtcaaaataaacttttacaactgtgaaaattaactaaaggcttgcaacatgctgagaactgaaaatattgagaagcacttatttaagaaaaatggctgaggctgggtgcgatggctcacgcctgtaatcccagcagtttgggaggccaaggtaggtggtttacttgaggccaggagtttaagaccagcttggccaacatggtgaaactcagtctctactaaaaatacaaaaaagaaagagaaggaaggaaggaaagaaggaaggaaggaagggagggaagagagagagaaagaaagaaagagagaaagagagagagaaagaaagaaaagaaaagaaaggaaaagaaaagaaaagaaaaaagaaaagaaaagaatagtcgggcatggtggtgcactcctataatcccagctacttgggtggctgaggcaggagaatagcttgaacctgggaggtgcaggttgcagggactcgagatcacatcactgcactcagtgcaatgagatgtctgttttggtaccagtctgtgcactacacaaggcaatgagatgacattcaaaatgttaaaagaaagattgtcaaccaagaattctatatcagcaaaccttcaaaaaacaaaggagtaattaagacatttacagatgaacaaaaactgagagaagtcatctttagcagacttgccctacaagaaattctgaaaggaatccttcagcataaaatgagagaaccctacatgttaaatccacatgaagaaataaaaagtatggtaaaggtaactacataggtaaatgtaaaagacagcagaaaagtgtttttatttgtaacccctttcttttcctctcttatttaaaagacaactgcatacagtaataattataaaactatgttgatttgtaatgattatgaaccaactataaaccaactatgttggtttataatgtatagttagtatgacaaaaatcgcacaaaagtggtatgagagaatgaagttatattgcagcaaaatgtttgtatactgttgaaattaagttggtattaatccaaactatattattttaaattaatatattaattgtattccacagggaaaccaccaaaacaataactaaaaacatatagtaaaagaaacaaagggattaaaattgtatactagataatagccattaaacaaaagaaagcagtaatgtaggaataggaaataaaaaatatataagacatagaaaaagaatagcaaaatggcacacaaatttaagaatgaaagactaaacgttttccccttaagactaggaataacaccaggatgtccactctcaacacttctatttaacattgtactgaagtttctagtcagggcatttggtcaagaaaaataaataaaggaacctagattacaaaggaaataaaatgatctctatttacagataataagattttgtatatagaaaatcctaagaaacctaaaaaagaacttattagaactaataaacagttaagcagggttacaagatacagggtcaatacacaaaaagaaaatatattgctatacattaataataaataactcaaaaaaataaaactaaggaaacaatttaatttacaatagcatcaaaaaagaataatatacttagtgataaatttaacaaaagaagtgcataacttggacattgaaaactgtaacacgtcatagaaagaaattaaagaaggcctaaataaatggaaagaaacccatatttgtggattgaaagactcaatattgttaagacggcaatcctccctaaattgatctacagattcaatgcaatgcctttcaaaattccagttggctgtttttttcttttccttgcagaaaatgacaagctgagtctaagattcatatgaaaatgtgatatggttaggctttgtgtccccacccaaatcttatcttgaattgtaatccccataatccccacgtgtcaagggagagaccaggtggcagtaactgaatcatgggagtggcttctcccctgctattcttgtgatagtgaatgagttctcacaagatttgatggttttataatgagctcttcccccttcactcagcacttctccttgctgctgctttgtgaagatgtcttgcttcccctttgcctcatgccattattatgagtttcttgaggcctccccagccatgcagaactgtgagtcaatgaaaactccttcctttgtatgggttcatgtcctttgtagggaaatggatgaagctggaaaccatcattctcagcaaactatagcaaggacaaaaaaccaaacaccgcatgttctcactcataggtgggaattgaacaatgagaactcttggacacaggaaggggaacatcacacaccagggcctgtcatgaggtggggagagtggggagggatagcattaggagatatacctaatgtaaatgacgagttaatgggtgcagcacaccaacatggcacatgtatacatatgtaacaaacctgcacgttgtgcacatgtaccctagaacttaaagtatataaaaaaaaacaaaaaacctctttcctttgtaaattacccagtccccagtctcaggcagttcttcgtagcagtgtgaaaatggactaataaaaaatgcaaaggatccagaatagccaaagcaatcttgaaaaagaaacaaagttggaaaactcacaccttcagatttcaaagcttacaaagttacagttatcaagacagtgtggtactagcataaggataggcatatgggtcaatggaatagagttgagaattcataagcaaattcatatttatttatttattgagatggagtttcattcttgtcacccaggctggagtgcaatggtgtgatctcagctcactgcaacctctgcctcccaggttcaagctattctcctgcctcagcctcccaggtagctgggattacagggacccacgaccaagcctggctaattgttgtatttttagtagaaacagagtttcaccatgttggccaggctggtttcaaactcctgacttcaggtgatccacctgccttggcctcccaaagtgctgggattacaggtgagagccagcatgcctggccaaattcatacatttatgaatttgatttgtaccaagacaatccagtgggaaaagaataggcttttaacaaatggtgttgggacaactggctatccacatgcaaaaagaatcaagttggacttcttccttatgccattttaaataaactcaaaatgaagcatagacctaaataaaagagctgaaactacaaaaccttttgaagaaaacaggtatgaatatttgtaaccttgaattaggtaattgcttcttagctatgacacctgaagcataagcaaccatggaaaaagaaggactgctagtttattttctcattgatttgtgggggggtccatgtatctagggaaacaatccttttctcagttttaggaattgcaaatatcttcgaccgttctgttatctctcattaattttgtccatgattatccttttttgatcttaaatatttatctttgccttgtggcttatgctcttaaagttttgctaaaagtgtcttttttcatccttaggtgacaaatatatttttctatatttccttctgttaagttggcggttttatctttcatgttcaagccaataatccatctaaaatccaccttttcatgtattttcatttagggatccagattcatttttctccatacagtgaatttgtttccctcaaagtgtataccatataatcatttccccattgttgtatggacccctctttatcataaattaagtttcaatatgtaaataggtctattcctgagttcctatactgttccatagatctatgtttgttcttacaacaatattttaaaaaaattaataaggctattagaaaagtaggactagaaggacattttctttttctttttttaattttatttatttatttatttatttattttgagatggagtctcgctctgtcgcccaggctggagtgaagtggagtgatctcggcctactgcaacctccacctcccagggtcaagcaattatctgcctcagcctcccgagtagctggacttacaggcatgcaccaccaaacctggctaatttttttgtactattagtagagatggggtttcaccatgttttccaggttggtctcgaactcctgacttcaggtgatccacccgtctcggtcttgcaaagtgttgggattacagacgtgagtcattgttcccggccagctacacttatttcaaaacaaaaaaggtagctttttttaagtccatgagcagcagaatcaatatcaagtagaatggtgacagcctgcccttcaagacatatttatttattcttgctagaaatgagtatataagttgctatggtgatggttgtcaactggaccacagagctggactggaccttcaatggggtgaaaagtaggtaacccctgctgcctgtgagaggtaagacatccagcatctcatcaaactgatgctaaagaaagattttctgctccctgtaacataaaaggattttactgcatgggtatatcagtaagtgcatttaggtcaacaaacagttctactcaacaaccacacaatatgtagagcttgctcaagcaaattgtgtgataaccatgtgcttttatagacaatgtaagtcattgctacatattatttgtaatgattgttggcttgtttagtgcggttccaggtcttttaatcccttcacatatgaccccaaatttgagaagtctgtcagatatccaagtggtgatatctggtggacagtaggatgtcagtctggtgcttgccagagaggaaactatgagtttgaccgtggtcaattctatatcttcctgggactggaagagatcacttagaggaggagtgtggatatagagaaggagaaggatgaagacaaaagtcctcaagaacatcaatatttagaggttgaggagccaaagaggaattagtcaaggaaaaaaggccagtgtggtgggaggagagtcacagggcctgaaagtgttttgagaatgaaggagaactcaagtgtgtctatcgctgctggcagatctagttaggtgaagatggagaactgtctttgacatgggtcaccctgtagtatgataataactctaagaagtgccattttgattgaatggtggacactgcaaaagctcagttggagagggttcaagagcccatgggaggtggaaagtgggcaggcaaaagagggagtggctggagtgaatcaagagagaatactttttaaagacatatgaaatcaaatcatgtttatttgccaatgggaataatttggttgaggggacaatcaatatggcatgaatgaaggggatatttgcaagggcagagttcttgagagcagaaggagattgaaactcaaagcacaagtggaggagtggccttcatccctaccaagagagaaggtggattttgcaggtacaagcccaggtaaggtgatagatgcgatggtagggatggaatggttcttttttgactgtccacctttctatgatatattgggcaatgctgttggctgagatgggtggtggggggggcaggtgagggtgataaacatgattagatttcatatgtctttaaggaagtgtggaataagcatcccagaaagtaagaggggaatgttttcaggaattgtaagtggagtgacagacattcctaggtgtcatgtgagagttgtggtcataattttgaagtaaaccaagttggattggtttgtatgattttttaaaagtattcatctgtttaggtgtgggtagagtcaagaaacagtagagctagatcagggtttggtgtttcctaggtgtatcaattaggatgtttttcattgtgagtaacagaaaacctctctcaagccaccttcaacaataagaaaatgaattattgaacttaaaagaaggttcagacgtaggtcaagctccagggttgttgattcagtggccccgtgagttcatcaaggactcaggttctttttccctctacttggctgtctatggaattggctgcttctcgtggcttgcaccctgctcttgtgatgcagtggctgggggcagtcagtctacctctacccgcttcctcattcatgtggagcaaaagagagggaaaccctctcatgctctcaccagccagggaagacagggcatttccttcaggcattaacagttaccatgggaatgccatgtgctggtggcttcagtctggtcctcctgaatcagtcattggcaagcaccaagggatttctaggatggatttagaccagtggttctcaaagtgtgatttttggaccggcagcatccgcctcacctgggaacttgtttgtttaaaattcaaattcttgggcctcactctagatctattatatcagaaattctggggggtggggccctacagtcagtattttaacaagccccccaagcaattctgatgcacggcaaagcttgagaactaatggcttaggataagacagtgaatgccatgaacaaaatgagggatctttgaggaaggaggatatggcaataaacatctactagtggctactagaccaggtgggcacctgagagaaggctcacagagttcagggtgcctgcgatgcagacattctagggaagggctccaaaacaagggttagaagaaaaatgaagacacagaggaacaatggatccggtaaaagtggtgaaattagtagactggtgatcacaatgaagctggagaattgcaatgagttagcaggatagaagacgtgatggccacacagatgaactcacagaactccaactgcatgtctgaaccaaggtcacactgactattcactgctctcagccaacaaatgagggtggcaagaatgctaaggcctaagcttcattcagggccacacgctcttcagatggttgactttggctcaaggaccaccaccaactccccatcacctgactttggtgagccttctttagactgcatgttctgtttctttgtttgtttgtttttggaaacagagtctcactctgtcacccagactgaagtgcagtggcatgatctctgctcactacaacctctacctcccagcttcaagcaattcttctgcctcagcctcctgctgggattacaggcatcctccaccacaccaagttacattttgtatttttagtagagatggggtttcaccatgttggccaggctggtctcaaactcctgacctcaggtgatctgcctcccaaagtgctggattacaggtgtgagcccccatgcccggccctgcatggtgttctaagaatcttccatccaaccttctctctcattctccttcactcatggttagacttgtatcacagttcagcagcactgccatatttacccaactccgtccctaatttttttctcacagaggcacttccccttttaatatttttggcatctgcttcttgggagaatgtagactaatatggaagtttcctgagtagagtttgaaaatgagattgtgtgtcaggtactgtgctatgcatggagtatggtagggtggtctctgccttgctagagcaccactgaggaatacagatgtataaccagtcactgcaggacagcatagtaaggcatcatggggcagtcccagctgctggagttgacgtgggcatgcttagggatggtggaaagatgatgatactgttggtagggtggatatcctgccaactgatagcacacccattagtttagggaaagacctggtgttcagttgctagcctctcaaagagttgtccccacaaacacgtgtgtaagtatagctcaatgactacactgaaaggatatagtctcaatgaatgtcattggttcctacaggcatgataagacaatttctatcattattcctgatatggtttggctgtgtccccacccaaatctccaactgtagctcccataatccccacgtgtcacaggagggacccagtgggaggtaattgaatcatgagggcagttttttcccatgctgttctcatgatagtgaataagtctcatgagatctgatggttttataaagggaagtttccctgcacatgctctctcttttgcctgccaccatgtaagatgtgactttgctcctttcccttccaccatgattgtgagggctcgtcaaccacatggaactgtgagcccattaaacctctttttctttataaattacgcagtctcaggtatatctttattagcagcatgagaacagactgatacaatttcctttcccatggccttcagaaaatagatggatgacttcacggatgttgaggagagaggcaaatactttataacggtttgctttttgtgacaaagtctttgttttctgcctgcctttctctaacatttcccctagtgactgtcaacccacaatgagtggttctttccctactgactgcactaggtagttgtgagggaccatgagataaagccccaagctcccttaacaacagtaagctgctctcccatgcagagtccttattccatctccaactcaggcctggctacaggcacctgaggaaaggagtgtgctccagtctcctgggctccacacacttccattctgaagggaatgttgggtcccttttggatttttatcctgaaattcaagatccatgaatggattcgagggaggctaaatctcctggaattatgtgtacatttcttcacacaatttttttgtatacaatttgcaacacagtttttttttgtcatttttgtatgtttatgacatgttaggggcataaaaagggatggggtccatagttttttattatttctcaagtttgtgacctcaaaaaatattgagtcagtctttttttttttttttcagatgagtcttgctctgttgcccaggctggagtgcagtggcacaaccttggttcactgcaacctctgcctgctgggttcaagcaattctcctgcctcagcctcctgagtacctggcattacaggcacccaccaccattcccggctaattttttttgtatttttagtagagacagggtttcactgtgttggtcagactggttttgaactcctgacctcaagtgatccacccacctcggcctcccaaagtgctaggattacagatgtgagccaccccacccggcccagtcactttttttttttaagagaaaaatactcaagcctttatagggtgtctagatgaaaaactgcctttaaagggtatctgttgttgtagttatccattttaattttaatattattattctactttattttatattttagtttagacaggggcacactctgtcacccaggctggagtgcagtggtgccatcatggctcactgcagcctcaacctcccaggcagaagtgatcctcccatatcagcctcccaagtagctgggaccacaggtgtacaccatcatgcccagctaatttttaaattattttctgtagagatggaatctccctatgtttcccaggctggtacgcctccattttagattaaaagaaaggtccctttttctttgtggtgatataagaaatactgtattatggaattttgtgggataataataaaagggggctggtatatggaacaaaaggaaattaattttgtaccttaataaatctatgtcataagagaattttaacctccatagaacactgtcttggaaaccgaaaactaaaaagaagaaaaacatcataatttttcttttttaaaaattctcttttctttctttgttctttttttccttccttcctcactccctccctctctctttctttctggttaatcttaggcctagttatttccagattaacaggcaaaagtcttcattagagttatagttacaacatgaaaattacaggacaaacttaactgtgttacaaaaatgccaaacgcagatggaagtgtgcaattcttgtctgtctgaactttccctcattcaccacgagagggagcgccacaccacagggacagctcccttcactgcctgcatagctgtcttaatggtctgctatgtcgtgaacattttgcaacgtatgcacagaggtcagcaaaatcatggaagaacagggccttgctgattggtatacatgtcatgaggggccccagcagacctcagctctgtgttcaggtcaagaagctgcaggtgacccgagacacagcagctcctaaccacgccctgatgtgcagcctgcgtgctgctgcggggcaggtcctgaggcctccatcaactcatcttttctagaatgacaaagtgaaactcagttccttcctctacaggtgacaaagcaggtagagtaatcgatgagctaataagtgagtagacatgctaaagcatttatgagatctattatgatctcctgtgaatgataggaaagatgctatagatgagaagctgacatcaggttcagttatttttattcacaattttctatcaccagctctgtgctggtgattgtatttgaagtgtatggtctcaggtattgatgacagctggagggagatccttggaggctggccttcaggctcttttggtttttattgtttttaattgtggtcaaatatacataaaaataaccccttttaaacgtgcagctctgtggcactgtgtacattcacgttattgtgcaaccatcactacagtttatctacaaacccttttcatcttctcagatggaaacacggtacccataaaccaacaactccccattctcctctcctcccagtccttggtaacttctgttctactttgtgtctctgactctatgaatttaccttttctattctaggtaccccttataaagggaatcatgcaatatttgtctttttaaatctgggggatttcactcagcatgtcttcaagattcatccatgtggcatatatcaaaatgtcactcctaaatgtggtatatatgtaaggagttattatttatattgtatatattccacacaatgggatattagccataaaaaaaagaaatcctgtcctttgcagccacattgaaggaactggaggtcattatgttcagtgaaataagccaagcacagaaaagcaagtgtggcatgttcttacacatatatgggaactaaaaatcctggatgtcataaagacagagagtagattggtggttaccaaatgctggaaagagtaggagaaagatggggatgaagagaagttgattaattggtacgaatgtttagttaaatagaagaagtaaggcttagtgttcaatagagcagtagggtgatgatacttaacaataatctgttgtatatttcaaaatagctgtaagagaataattcaagtgttcctagcataaagaaaagataaggcctgttgcagtggctcacgcctgtaatcccagcactttgggaggccgaggcaggcagatcacgaggtcaagagatcgaggccatcctggctaacacggtgaaaccccgtctctactaaaaatacaaaaaaattagctgggcctggtggccggtgcctgtagtcccagctactcgggaggctgaggtagaagaatggcatgaacccgggaggtggagcttgcagtgagccaagattgccactgcactccagcctaggtgacagaacgagactccatctcaaaaaaaaaaaaaaaaaaaaagaaaagataaatatttaaagtggtgaatgtgccaattaccctgatttgatctttacacattatatgactgcatataatgtgtatatataatatataatgtatatagacatgtactccaaaaatatgtacatctattatgtatccataaacttaaaaaaaagtctctgttgtttaagcaaaaaaaaaaaatggttgttcatttttaaggcgaatagtattccactgtatgtatgtcttaatgtgtttagtgttataacagaatacctgattctgggtaatttattctaaaaagaggtttatttagctcatagttctacagatcaggaagttcaagggcatggtgctgatttttggtgatggcttccatgctgtgttataacatggcagaaggtcaaagcgggagcaggtgtgttcaatatcacaagagcagtgatatcactttataagaactcccaggccgggcacagtggctcacgcctgtaatctcagcactttgcgaggctgaagcatgaggtcaggagttcaagagcagcctggccaatatggtgaaaccctatctctactaaaaatacaaaaaaacaaaaattagccaggcatggtggcacacacctgtagtcccagctattcaggaggctaaggcaggaggatcgcttggaggttgcagtgagccgagatcgcaccattgcactccagcctaggtgacagagcaagactccatctaaaaaaaaaaaaaaaaaaaagaactcccacttccaggagctaatccattcctgagcaggtgagagctctctctcatacctgtgagtgagacaacattaatctattcgtgacgatggggacccatgaaccaaacacctcccactaggctccacctcccaacactgccatgttgggaatcaaatttcaacatgagttttaggtagggataaatcacatcaaaatcatagcagtatacaccacattttgtttatccattcattctttgatggacatttgggttgcttctggcttttggctattgtgagtaatgctgcaaagaatattaatatacaaatatctgttccagtccctgctttcaattcttttgggtgtatacccagaaatatagcacctgataattctgtgttgaatttttttgagaaactaccatactgttttcctcagtgactgcaccattctgcattcccactagcaatgcacaagggttctaatttttccacatccttgccaacacttattgttttcttattttctctttttcagaatagccatcctactgggtgtgaaatagccatcctaatgggtgtgatttgtcttgttcaacagttttatcagtgatttagatggaaacaaagaaaagttgcttatctgatttgttgagcaaaggaaggtagaagccgatgtgttatatgacagaactgtgaaccaaaataaagttgctcacttacacaggggttgacaaactatagcctatgggagaatctggctcgctgcctgtttttataaacgaagttttattggaacatatctaccttcatttgttcatggatgtctatggctgctttgcgctgtaatggaagaattggttacttgagacagagactgcatgacctataaagcctaaaacatttattatttggcccttttcagaaaaagtttgttgacttctggattatatgtcttttaaaattctatttatttattttttattttattttattttatttatctatttgagatggagtctcgctctgttacccaggctggagtgcagtggcacgatctcagctcactgccacctctgcctcccaggttcaagcaattctcctgcctcagcctcccaagtagatgagactacaggtcaccaccacgcctacctaatttttgtatttttagtagaaacggggtttcaccatgttggccaggctggtctctaactcctgacctcaggtgatccacccatctcggcctcccaaagtgctagaattacaggcatgagccaacatgctcagtctgggttatatgaaagagacaaatttaaccagaaaatatttaatctctataagtataaaatatttgtatgtaagtaattaaaacaacaaagaattgggaactagctgggcgcagtggctcacgcctataatcgtagcattttggaaggctgagggaggaggattgcttgagctcagaagtttgagaccagcctgggcaacgtattgagacctcatctctaaaaaaaaaaaagagagtcaatggctttctatcatgtaaaaagagacatggtgttttgttttgttttttaacagtagactaaatatgactcaatattgactttagtgttgattgtaattttataccacattaacaggaataagcatctataacagtgattctcaactttggctgcacatggaaatcacctagaagatttaaaaatactgatgtcaaatccctggggaatctgatgtaaacgggctgggtgtggcctgggtatcagagattttaaagcttctcaagtgattcagtgtgcagttgtgacattccccctctgctggactcaggcccagtctcacctacagcttcattccatatgtcccattttatttattttttatttttattttttgagacagggtctcacactgttgcccaggctggagtgcagtggtgcaatcatagctcactatagccttgacttccagggcccacacctcagcctcccgagtagctgagaccacaggtgtgcgccaccatgcctggctaatttttttgaatttttgtagagatgagatctcactatgttgcccaagctgatcttgaactcctggtctcgagcaaccctcttgccttggtttcccaaagtgctgggattataggcgtgaaccaccatgcatggctgtgtcccattttaaaggaaataaagacaagctggttccttttcaaggaggaggagtcagaattgttgggggggaaaaaacaggaattcatttttataagaggaacaattgcagaaagtacaagtgtgaggatcctggagtgagatgtttctagctggcattctgcgtttgagggctgcctcatagaagaggggcctgactgcttttgtatgacatgacccaaggatacaagctgggagcggggagtagaactgccccgctattattatgacttttctttgaaaacagtacgatccaaagagggatagtgccagagggtccacccatcccccagatcaccaacaggggtaccatggagcaggtccgggagtggaacacctgatagtaatggtcaagatagcccaatcccaatggtgcgtatctattggtgctttctcatgccaggcaccatgcccagacactgcgttttctgacttgtgagttcacaccatttccacggggagggggctatgatttttccaggtcatatttgaggaagcagaggttctgaggcttgtcctggttcatgtgtggtggcagagctaggacccatttgcaagaattaaatctgtccacagagaatgcatattgccaacactgagggatttatgaagaaggaacttttgcttccaaattgtttgatgaatggttttccagcctgggctcctctgattctagaaaatacaatgtgtaaataactgaaaatatgaggctgagttttcacaaaaatgaggttgtattgaaaccaaatcctccagcagtgacctatgcagatgagaggtgggattcaaagcagtctccttagaaaacttgatccttagaatctggcatgtcagggctccaaggaaggcaagggatgatctagtccacacccatctcccaatttacagatgaagaaacaagtccagaaagggtctggagacttgtcctggactacgtatttaatatttagaaaatggtgttcttccttttgctgccttaatcaaacagtcctacccttactcaaaacagtgctggggctcggctcatctcagagtccatgcggcaggaaccggagagaatcaatcccttcacttagtggtacattttgactttgattcaaaacaacattactgagcactccgcactcgtttcatgttccagtcttaactctgaatgacttgtgactatctgcaacaattaaatcagcccagaaagaatgcagattgtcaccactgagggattgacaaagaaagaacttttgcttccaaattgcttgaaaagtaatttccaaagaagagttgccaaggagctgttgtgcacatcagtgtcacggacagggcattcctgcccaccagcccagggcaacttcactggagagtccagcaggccctgctgggtgcattctggtatgcgtgccacaaatcagccactgaatagctttcacagaagctgccccccaagagagaagctctcctctgggaagaagctgccaggctggggtgacatttctcagcaccccacccccatctacccactcagatcttgcatctaggtttccagcagtgtaaccaatgagtagaagggctgcacgtgacttctggggcaaaggtaagtaggagaaaggtgcaccttctcttctcctgctcatttcccatcaaggagctgcatgcaaatacctcctatgccccagggagcgagtgccacaagagggaaagaacctgggtcagaaccagttttatactttagctgaacaagaaataaacttttatctcttaaacctttgaactatggaggttttacagcaggtagcatagccctaatgtggccgcccaagtcagattttaccaaaacctaaacagagacacaggctaacatggtgcctgctacactaacagcattcaataaatgtgttggtgagtaaataaatgaatctcaaggatgtgattaatggtttatttagtcaaaaggaagttaaagaatgctaataaatgacttttcggttgcagagtgtattttgctacatgctgacccctggttttcccagctgcactcaggaataaatgaggggaaattaattgtaatttctatgaagagacagccacacccaggaatggatttctgaatcaaataaggtcattttaatgcatggagagctcagaaaacagagtaaggagctcctctattaggtgaatttagggttctttgctggcttgtgggtgtggacatagagccatgtccatatactgtgtcattgccttgaaatgctgtctcctgtacatcagagctggaagtggtcatacagcacctggcctgttcttcatgtcacagatgagtatgccaaagcctgggaaatggacaactcgcccagggtcccttggtcatcagcaggcccacactctaggcaggatggtgtggattaagggtggggacagtggaacccagttgctaagctggatttttttctaggtcactttgcaagccaggggtcttcagccagtgacacaccacttgggcctcactcaaccacgctacctgctacaggagatgggaccatctccagatgggaccacccatttggcccacctgggctgagtgtggcttgcacactggttcccaagttcctgtcccatgcccaagaagaatgaggatgcactgacaattaaaaagagagcaaagtggggagttttattgagtgatgaaacagctttcagcagaaaggggatgtgggagtggtccccctacccaaaggcaggaatgtcccccctaatatggctaagtctggggcttttatgggttcagaataggggaagggcaggctgtaggtagtattgaaaaaggcaatattcgattggttaaaagtcatcattcagaaagaataaattgggaaagggtgggcaaacaggaacagaagttctcactctgggacgtgggtttcatccagtctttcaaccttcaggctgtttttggcttgaaggtggggtttcaccggggaccctcccctatctgccaaggcatttggctgcctcctgtcactgtcagttgcctggaatcaaatcctatctctgcttcttgcaaattacttaactcccctacacttgtttccttacctttaaaatggggataattggaatagttcctacttcatggccatgtcatgaagattaaatgagttaatatatttaaggtgctcaggatgggacctggtgtgtaataagtaccatgtaagtgttagtggttgtggttacattatagtgattattattaatgaattcaaattgcccctttcctgtgtcaccgttcttaagcttcagaataaagatattaaacatcatagaaaatggaaagccacagtgaatcagaggatgccaggaactcttataccaagttgtcagaacacacagcctaagaaaccagaatttgttataaaataaagtgtgaattgatatttggcacacatggagttattcattaagagtagagaattcaggccttattcatgtctcaggaatgggctaaggacagtataagtgcaccattgttcttaactgtagaaaggaaaagaaaatatgagtgtaaaattaatcctggatgagagagaatggaatatgagaagcagcccagaaaacaaacatggtcagatattgcttttctctggtaagattccaaagacattgattgttgtggatttaatattacaaagaagtttatcaggtttggggaatcctagaatgtcaggcttttagagaactgcctagaactcaagagggcttcattgaaccaagcacatatatcctctcaagttctcctgccccaaccttcattcgatggcagatctccttaatatatccacagcagatggttggctgacttgtgcttggatgctctcctaatgggaggctcagggcaccacgggccacccactggttaccagacagctctaactgttagagaattctttcctagactgggccagtaatctgctttactgaatattggccgattatccctacatttatcttttggtgtaaaagaaaataaatcttgctttctccttcttgatggtggagactggcattagaacttctggtagattgctggtcctgacattaactgagctatgagacctcaaacaagttgcttaagctctcaatgccttgccttgctttactttaccttattttcataagaggcttgtgaaggttcaggtgaataagcatgatgtagataaaacatggaggagaaagcctgttactatttatccaatagatgatggttaaaattatcactatgtgaattcagctcttgggactcccaaagccttctctaagctaaatatcccatttcctctatgatatggtttggctgtgtccccacccaaatctcactttgaactgtagttcccacaattcctacatctcatgggagggacccagtgggaggtaattgaatcatgggggcaggtctttcccttattgttctcatgatagtgaataagtctcacgagatctgatggttttataaagaggaattcccctgcacatggtctattgcctgccaccatgtaagacatgactctgctcctcattcaccttccaccatgattatgaggactccccagccacgtggaactgtgagtcaattaaacctctttcctttatagattacccagtctcgggtatgtctttattgtgagaacagactaatgcactccagctgttcctacctggcctggtggccaacccccaccccattctggttgctctcttggattgcttaattgaaggtttcacttctccctccacttgtcccatcatcatcagtccttgtccaataaaaagagaccctcaatgaagggggactcaagtcagaacaggtgcagctggctcctgaaggagtgaaaagattctaactttaggggctgagacattctagtggggaggaggcctttggggtgccccaggaagaagtcaggtcaaggcatgaacccacaggtggctgctccagggttgtggtgtgtgggcagagagaaagctaaaggggagatttcagcttttctcccagaatgttcaagccatctccaaggagcaagaaaccagtcaggattcagtgaagatctgtccacaaataagaaactatgacattggaaggtacttgctttatcttgtgaccctcaagtccctgagctcagttaacggggtgcaagaggtagcctcttgctaaattaggtttatttatcacccttgatctgggcactgcaatatcacaaaaactgcctaaattcatgccccattagtaacatgctaatgatgttattactcacttactgagtttgtggtcgctaaaacctttagatttttttttcatgagaaccacctgcaaagttttttccatgctgcatgtgtatagctgactttggaaatcaaatagggaaatttataagctgccagcacagtgtctagcttgttgtaagcactaaaagaatggtagctattttattagcagtagtggtattaatattatccttgttaggtttcatttccctggtttcagcagctttgctcattgaggttattttgagtaccaattctgtttctctctctctctccccacccccctctctcctcccagcctccagctaggctccagtttgaccagggtgctatctgagtctatcttggggcttaacttaatgatagaatctgatacagcctgagacacagagcatgcacaattagaagcagtgctaccacttcactccttcttttcatccagaaacagatccctcatcaatgtccaaaattttacaatgagaaaatttcttccctggctttagcattgtccttctctctattattcaaatgtaaaatacaaatgtctgtggaggaactacttattaaccacctaggaacttagacggaattagttgataaatatgaggatcctgggttatggagagacagtggaagtagaaggaggtgtgacatcataacaaaattatatgtatatatatattttttggtctctgtctctggttcctggcatagagttcctaaaacctgtaaattcctgagcaatgggggtgctaggtatatcttttgttctactattttttttttttttttgagacagagttttgctctgttgcccaggttggagtgcaatggcacgatctcaactcactgcaacctccacctcacaggttcaagcgattctcccgcctcagcctcccgagtagctgggattacaggcacctgccatcatgcccagctgctttttgtatttttgtagagacggggtttcaccatgttggccaggctggtcttgaactcctgacctcaggtgatcctctagccttggcctccgaaagtgctgggattacaggtgtgagccaccatgcccggcctactatttggcttttaaccctgtctcctgacacagagcttctagtccttgaggtttcctgggtgatgagagcatcttttgttctaatgaggtgactcctggtggctcctggatggcagctggtcactagaaagacgataccatgattagaagcatagaactttcagcctcatgcccccattttctgggaaggagcaaggggctggagatggagttgagtacataattggtcatgtctatgtgagaaagcctccctaaaaatccctgaacaacacagttcagagagcctccaggttgctgaacaggtggaggtgctgggagattggtgcaccccagaaggcatggaagctgcatgccccttctcccctataccttgctctaggtgtctcttctatctggcttttcctgagttgagttgtatacttttgtaataaactggtaatcaagtaacaaagtgtttccctgaagtctgtaagacaatctagaaaattatcaaacccaaggaggtggttggggtcagaagcacaggtgacaacttggacttgccattggcgtctgaagaggggcctgttttgtgggactgagctcctaacctgtggggtctgcactgatttcaggcagatagtgtcagaattgaattgtaggacacccagttggtgtctgcagagaactggaaaattgcctggtgtgggaaaaacccatatacatctggtgccaaacagagagtgttatgagtgagtgtagaaggaaaagcagtggctgggtgcatggctcacgcctgtaatcccagcaccttgggaggctgaggcgggtggatcacgaggtcaggagttcaagaccagcctggccaagatggtgaaactctgtctctactaaaacaaaaattggccaggcgtcgtgatgggcacctgtaatcccagctacttgggaggtggaggcagagaattgcttgaactcaggaggcagaggttgcattgagctgagatcatgccactgcactccagcctaggtgacagagcaagactccatctcaaaaaaaaaaaaagaaggaaaagcagtgagttttcccatacacagtgtaaaaggagataaacctgtgaagaaagggatgaacaggccaagcacagactttatttacatcccacacttgtcttgagaagttttcatgaagctacacaccaagagaatggtagctattttattattggtattattatccttgttaggtttcattttcctggtttcaccaatttagtttgttgaggttattttgcccttgcagagaagggcaaaattttacacacagagattgtagtgagttgaatggtggcacccaccccaaaatatatacccacatcctaatccctggaagctgtggatgggaccttacttggaaaaaggatctttgtagatgtaagtaaattaaggatcctgaaatgagaccatcctggatcatccaagtgagcataaatccaacaacaagtgtcttttttttttttttttttttttgagacaagttcttactctgttgtccaggctgaagggcagtggcacgatcacagctcactccagcctcgacctcctgggctcaggtgatcctctacttcagcctcctgggtagctgggactataggcccacaccaccacgccatggctaatttttgtatttttagtagaggtggggtcttgccgtgttgcccgggctggtcttgaactcctgtgctcaagggatcctcccgccttggtctcccaaagtgctgggattatcaacgtgatctgcccgcctgaccttaacaagtgtctttttaagagaaaagcagagggaggtttgagacggagaggagaagccaagtgaaggtggagacagagtttagggcgatgcagggaggaaagccaaggactgcctggagccgccaccagaagctgggagaggccaggaaggattctcccctagcactcccagaggatgcagggccttgctgacaccttgatgtggaacttctggcctccagggagaataaacttttaagtcaccaaattggtttgtgataatttgttacagcagccacagaaactaacacagagggtattttcctcctcacagtctgaaggacctgcccaggggaagaagtaaaccacctcttacctttccgaccatctcagaaccacgaggaaataggaagtgaggcctggtatgcagagggacgactcaaacaggtgattaaggaattaaccagtcacttgttggaggataatgcctcagtgagcaagaggcatcccgagttcatagcagacaaggacgcctgacagctctggtggtccctgacaagtctgacacccacggagaagcctgaggggacgaagctggcctgggtgatgggcgccatgttggatcccagggaggcaggaaggcaccaggcaacgcccctgactgggagtcatcccaggccagcgtcttcctgtttgctcaggaagaaacattcattttctctggcctcagcctcctaaactgaaaaaaataatgttgttccactctaagaatactgctgcgggctaatttattcatggctgtgacacacatagctttctttaaaataaagtccctggtgtcatttttaatagggtcataaatgcaactcgaagaaactgtctttttgcatctacctgtgattgtttctttgtatcagtcagggtagtctgggttattctgtggtaacaggcagtgcccaaatctcactgttttaaaacaatgaaggttgttgtaggctgaactgtgtcttcagatgtggtcacattctgaggtgcatatggatttttgaggggacacagttttttaaggggacattggtcattgagggaacacagatctttaagaggtaattaaattcaaatgaggtcattagggtgggcttttatccaatatgactggtgttcttagaggagaaaatgtggacacagacacagagggaagacgatatgaagataaaaggagacagtgcccatctgtaagtcaaggagagaggcctggaatggatccttccctcatagccctaagaaggaaccaatgctatggacactttgacctcagacttctaacttctacaactgccgagacaagcaatttctgttgcttaagccacccaatctgtggtacttagttacagcagccctagcaaaccagttggcttagaatgggtgtattaatccattctcacactgctctaaagaaatacctgagactgggtaattaataaagaaaagaggtttaattggctcatagttctgcaagctgtacaggaagcatagcggcttctgcttctgtagaggcctcaggaagcttccaatcatggcagaaggcgaaggggaagcaggcacttcacacggctggagcaagagaaagagatagagaagggggaggtgatacacactttcaaacgaccagatctcatgagaactcactatggcaagaacagcaccaagggggaatctgccctcatgatccaatcacctcccaccaggccccacctccaacactggggatagcaatttgacatgaaatttgggcagcaacacggatcaagccatatctatgaggaatagagatttttgcacttttcagtcattgctttctccctggttcccagaacaggattatgttctagacacttaagaaatatttgctaaattatgttgagttaatcttataataacataattaaggtcaactttggctatctgtgtgatgttagtttcttcaaaataatgtcttcaaataatttctctgaaataataattgccgatgtgggagaagctgtacttacttgtgtcactgagtcctcagtgcaattgcctggagctgaaagtggtgtcctggccctggccctgtcgtgtagcagaagatctatgctcttggagatgctgtgatataaatcaactcaagctagtttagagaatggaaggatttctttttcccctaaggagttaacaacaaagtcatggtaagtgtagggggtccttctgggccacagaaacaactagaagcagagatatttattttattttattttattttattttgagacagagtcttgatctgccacccaggctggagtgcattggcgtgatctcagctcactgcaacctctgcctcctgggctcaagtgattctcctgcctcagccctctgagtagctgagattacaggcatctgccatcatgcccagctaatttttgtatctttagtagagaaggggtttcatcatgttgttcaggctggtctcaaactcctgacttcaagtgatctgcctgcctcagcctcccaaagtgctggaattacaggcgtgagccaccgtgtctggcctagaatcagggattaaaatagcaccacaaatctctctctctctatctatctatctatctatctatctatctatctatctatctatctatctatctatctgtctgtctatatctatctatctatatctatctgtctgtctatctatctatctatctatctatctatctatctatctatctctgtctgaattctatatgtgcttctttcttcatagcaacttctttctttcctactgtgtcgtgctgcacagtggcgtcctctatatggctgggacctggctattggattctttccttagctccaacttgggtgctacctggagaaacattttgattggtctcccttgggatgggtgctctctctggtcccatcaactgtagcctgatgaccatgtactcttgcccagtgtagtcgggtgtttactctggctttattagctgtggtcaaggggacagtctatagcatagacatggccaccagtcaccattgttttaatattcattgaaagaaaagctagaaacccatcactatttatgcagactcttcctttttcttgggttcctgttcctgcttcatagttgattcctttgtcactcatcacagcctgcactcaggaattaaccatgttgtactttatactgatccctgctaaggaatctctcaaactctcagaaatgcccaattctgtgacaaagccagaccaccctctacaggtcggggcttgtgcccaccacaggctaaacagtctaggtttggccaagagcagggtttgaagaaagaggcatatcacagctgggcactcagtaggtgtcagtacattgtgttgaatgaaaggttctgagccagagtcctgaagcaggcacctgggcaggcacgatcacagggctctcacctctctagctgggacctgggcctgagctcagtccccgtgatggcccttggtgaactttctcaacatatccctttcttctcctttggtgacttcccatggctgaattctacctttactgtgtacagggttgctgtctatctcaagcccctccctgccacctatcataagctccataagggcaggcagtctttttcacaccgcatgcctgtcatctagctcactgcctggcatatagtaggtagttgaatacatgaatagggtaatgggtgatcagggcctggaggaaggtagcaggggaatctgtactagacccagagtcaggaaaggcatccccaagaaatggcattaaagctagggtgagaatagcctgggaggaggataagcacagagctccagggactctcctctctccttctctgcccagggacctgctgcaagctggcagcacagacacagccagtggggaacagcttgcagcaggcccctggacagggaaggaaattagtggcagagccaggcctagactttgactctccacactcgctgtcacagccagaagagtccctggtttggttccattccagaaggattatagtaggttgatgctttcttgaactccaatgtggttaaaatcatcaccaaacacttgggcccagtcagaggactccaactgtttgatattccatagactctcaagaggaaaccataattgcctattagtcattttgcagctggtaccaaattacgaaagacagcacactcgtgtgtgtgtgtgtgtgtgagagagagagagagagtcaaaaagtggatactaagataatgcagaatggcttagaatagttgagaaaataaacacgtaaaaagattagtaaataagaaaaccattgagtcatttatttgaattatataattgattcagaatagattaaacaccacaaatggatagagctgatgctcttaaaacccaaaagaaaacactttatccatagtgttggcagtgttggttcagtgttaatccaaatacgatatgaagctacccaaattcgaattaaagggttcttagtacagcaaacgccaggacagaataacaagaatccaccatccacccaaagctaaaaaaatgctgtgcatgcatgactgaaacccttctttcccaagtggaaacaccaacgcattaacaaatatttaatgggacttaccatgtgcgaggtactcagagaagcttccaaacttagcaaccccttttgtggctgtcctgagagatcctttcacatttactaattgcacctcagatccatttgttgatgaaaagcaccatgcagctggagatcttttatcaagattttacatcccctccctcttgctatttggctttcttttccaacggcatccaaaaatggggcatgagctcatgttcccctgtgctgccccttgttcacttcttccctctttcctaccaccattcaaggggcaggtttaggtgatctggctacagattgttcagcccagttggacccctttaagagttcttctcacctttttacaccgttggtgggaaagtaaattagttcaaccattgtggaagacagtgtggtgattcctcaaagacctagaaccggaaaaatacaatttgacccagcaatcccattactgggtatataccaaaagaaatataaatcattctattacaaagatacatgcacacatgtgttcattacagcactattcacaatagcaaagacatggaatcaacccaaatgcccatcagtgacagactggataaagaaaatgtggtacatatacaccatggaatactatgtggccatgaaaaggaaaaagatcatgtcctttgcagggacatggatggagctggaagccattatcctcagcaaactaacgcaggaacagaaaaccaaacactgcatattctcacttataagtaggagctgaacagtgagaacacatggacacggggacggaaacaacgcacactggggcctctcagtgggtgggagaacattaggaaaaatggctgatgcacgctggacttaatacctaggtaatgggttgataggtgcagcaaaccaccatggcacacgtttgcctatataacaagcttgcccgtggaccccagaaattaaaataaaataaaaattttttaaaaaagagttgtcctctgcctgagcaacataggagaccccatctctaaaacacatttcaaaaattagctgggcatggtggcatgcacctgtagtctcagcaactcaggaatctgaggcaggaggattgcttaagcctgggagtttgaggtcacagtgagctttgattgcaccactgcacgccatcctgggcaacagagtgagaccctgtctctaaaaaaaaaaaaaaaaaaaaaaaaaaaaagttgtcaagccgggcatgttggctttcgcctataatcctagcactttaggaggccaaggtgagtggatcacctgaggtcaggagttcgagaccagcctggccaacacggtgaaaccgcatctctactaaaaatacaaaaattagccgggtgtggtggcacacgcctgtaatcccaggctactcaggaggctgaggaaggagaatcgctggaacctgggaaacagaggttacagtgagccaagatcgtgccactgtactccagcctgggtgacagagcaagactccgtctcaaaaaaaaaaagttgtcttgtggcctagaaagttgtccctccactacacagagtccctggaggacatctaggactcaaggactcccttaccataaaatgacacatctgcacagagcagtaatttgatgaatgagtctctgtgactcccctgtagactcacagcattgcttctcaggccaagttctggaacatatcatcctattcccccatccatactgccctctgacaacaagtatctgaaatattttggcctagattcctatctcaggcagacacctagaattttagaaaacatcaagttgagtattgttgttagaggtggcactagacatttagcaacccagaagccaaacccacaagggaaaggtgtgaccagggaccacgcagtggacaagtttcagtgactgatggaaagctcgttataaccaaatgacatctcttcaccaggtgtagtggactgaataatggctttcaaagatatcaggtcctaatctctgaaacctgtaaatattacatcatttggaaaaaatatctttgcagatgagattacattaattatactgagatgagggagattatctggattagccaggccctcaatgcaatcacatttatccctgaaagagaagaccgaggtagattttacacacacacacacacacacacacacacacacacacacacagaggagagggtgatatgaagatggaggcagagattagagtgatgtgtccacaagtcaaggaatgcttgcagctcctagaaaccaaaggaggcaagaacagattctctctggaacctccagagacagcatggccctgccaacccttgattgtggcccagtgataatgatttcagactgctgccttctggaattgaaagggaataaatttttgttgttttaactcacctggtttgtggtgctttgttagggcaggcacaggaaactaacacaccaggtacagaacataaagagaggcgtcatgtgtgagagacatgcctttctcatttggcctttcccagaattaggtgtggctggtaaatctcagtgcttgatgtcggatattgattgcataagacatgcgagaatgacgtgagaggctttataaatccaatgagtcaaccagggacgggtggttggctgtggagacgtctaggtaagctgcgaccatgaccgggttaagctaacacttctgtgagaacacgtgcttcatacaaacagtccagacagacctagaagatgtgatctcctaggtctacaaactcctacaaagcaggagaccactgagatattaggttggtgcaaaagtaattacagttactgccatttaaaagttatggcaaaatcacaattacttttgcaccaatctaatgtaatcacagagctgcaacagaggttagtgctcacttccttctgcccatctgtgtgacaaagtcccagggttacacagccagccaggagggagcctcccctggcacccatgagtctcatgactcctagtttcctgttggctttctttctggctctgcctatctgctatggacctgtcattcatgcaaattgggtgcctctgtttctcgggagctgtgtagagcctagacaagttcaaatcatcccaaaggacttagagtaggtcggaatcaacataatcaatgcccctgacactgcccctccacatgccctacaggagttgggagcgcgcacctccaccctatattgttgtctccaaattcttctctcccttcccttctctcttcttccctgaggtcagcctcacattctgcaggtctagcgaaagggtgtctcacctcaatcatgagaaagaggagtcccagctccaggagaagcaggagcagcccaggaaggggcttctcagaccctgagaactgagccatggagtggccatgtgctgttttagaacacagctgacaggacaccttggctcttcttcaccagagactaaaatcaagagaagcatcagaagttttggagttctcactgttcttgccccagggccacagagcttcagctacctgctcctcccacaagatccagataactctcagccaccctagaggagtccttattcttctaggcccccaagggttctcaagcctagacacattaaaaatacctgagtatttttaaataatcccaatgcctgagtccctctcctacagactctgatttatttggtctggagtggggcccaggaatccatatatttttgaaaaatcactccaggatattctctctctctctttttttttttgtactttatttattatttatttatttatttatttatttccagagagggtctcgctctgtcacccaggctggagtgcagtggcgtgatcttggctcactgcaacctccacctctgatgttcaagcgattctcctgcctcagtctcccgagtagctgggattacaggtgcctgcaactatggccagctaatttttttgtatttttggtagatacggggtttcgccatgttggccaggctggtctcgaactcctgaccccaagtgatctatccacctcagcctcccaaagtgctgggattacaggccactccaggagattctaatgtgcaagcaagattgagaactcttgagctgcctggccttcagactttttattttgcatcccctctcagcaaatcatgaaaagccttgtcccctggcatcacagcttaaataagttaaagtagttgcatggaatattatttctgacctattatacataactatgaacatttttaaacaaagccattttaaatgtattaataaacatatccaatgatatctaaacatcatagtgatttgatatctattatccatttgaaaatacataaacaagccgggtgcggtggctcatgcctgtgcttccagcactttgggaggctgaggcaagtggattacttgaggtcaggagttcgagaccagcctggccaacatggtgaaaccgcatctctattaaaaatacaaaaattagctgggcatggtggcgggtgcctgtaatcccaaatacttgggaggctgaggcaggagaatcgtttgaacccaggggacgtttgaacccaggttgcagtgagccgagatcaggccactgtgttccagcctgggtgacagagcgagacttcatctcaaaaaaaaaaaaaagaaagaaagaaaaaatacataaacaagctcctttatagtagtctaaaattttacactacttttttttctccttgagctcatattttcattgcctttccctaatgtatttttctaatgtaatatatttttatactccaatgcctgttgatcatcctgttttatttctctgccacaaaaatatctacataaattgaaaattttatacataagacttttattctgcattcttaagccctaagtgttaaaatatttcttcttggttatcatgaatgtcactagtagtacccattaatcagcattatataaaaatatcacgttattaaacatgaatacaatttttaaataggaaaggtaaaattgcattttaaatgaatttctcagtgagctagatgagtatttgttcgtgttttccaatgagctcatgtatgtgggaatgaatgagacagagttagcaacagttttattttcatccttagttttatagattcaggtgctggtaaacattggcttacacaaataagtaggaggaaagagaaaaatttctcttatattagtagcactcaattctctaagctccttccaaggtatctgccaaaaatcatattttccatctgtcagttgacagctcaattaagtactccttcaattttgctcaaggcaaggaactagaaaccatttgacttgcagaaggatttgttactcagtcattagaaccactaatttctcttactctctaggaagtacaccaaaaagctttaccaagacttaccaagtgattcttaattataagtttctttggaagcatattttcatacctggtatattcagaaaaggttgaaaagcctgaaatatcattaatttcaattcttgtttatcaacgtaatttaaaaatctatactttttaaactacgtgctttgtgggctcgccccaccctgccccccagtttcagtcattcaacatacagaaaatgtctgccgtgtaatcaaaatagcaaggccaggtctcactgtcaaaacaggcttactttctgttagaaaatgtccagctttgccaggcacagttgctcatctctgtagtcccagcactttgggaggttgaagtgagctgattgtttgagcccaggagtttgagaccagcctgggcaacatagtaagaccccatttctttctttctttctttctttttttttttttgagacagaatcttgctgtgtcactcaggctggtgtgcagtggcacaatcttggttcactgcaagttccacttcctgggttcaagcaattctcctgcctctgcctccaagtagctaggattacaggcacctgccaccacacccagctaatttttgtatttttagtagggacggggtttcaccatgttggccagtctggtctccaactcctgacctcgtgatctgcccacctcggcctcccaatttctacaaaaataacatttagccaggtgtggtggtgtgtgcttgtagtcccagctactcaggaggctgaggtgggaggatcccttgagcccaggaggtcaaggctgtagtgagctgagatcttgccactgcactccagcctgggtgacaaagtgagaccctgtctcaaaaaagaaaaaaaaaatgttcaactttattttttaatgcaaatctttctgttgacttgcgtcctccatgatggcatccttgcattcctgactgagacatggacagctgggccatggagctccacccaccatgaatgtctgggtgacaatgtaatggggtccaggtgaagaaaggctcagctctgtcagggcatctgctttgtgcccatgggctccaccttaggagggctgccatctttgacagccagggcagggggtggcttatggtggaagaagggacccgtgtttgggtgggttctccaagaaacagacccacgatgagcttacacatgcagagacttggcatgcaaagattttgttagaggaatcaaggatgagagaaagcaaaggtggggtggtggtgctgaggaaggccgggaccggtcagatggcagtgtgagtgcgaggctgcatgaaggagagagggtggaagcatcccaggctgctgtgcaccctcaggaagtttcagcaaggccaccagggaattcgcgagtcaagtctggccatcggaggagtcccgagtctcccaggagcagatctgcctcagtttcccagtcgcattcagtggttggctgagagcagctcacggtgatggaatcatgcacatttgtgccagtggatttcagaaggcaggaactggggcccctgagtcaatttagccccctggagctggaattctgtgaggagccttctcatggccactccaggaaatgtttgaatgaaacttgtcaccacttctgccaccctggtctttaacagatgtgaaacaagagcatgacgacatggacaaaacaccgtggtttgtccattagccacaatgtacttaagatggaaccaatcatgggctcgtagtatcttgattaaagaaggctaatgccaatgtttcacattgttattgtttggcacctgggatgtttttaacacccctggggcaatgttcatactcagacgctggagaggtgaaagggatctcttcattttgcacggtgggacaggagagattataaatgggcagaagggaaaggactccttgtacataaactaggacatccctgtgtagaggttcccatggacatccccgaggggcagtgtcagtttgggtcagtctacttcttaagaagcagacactaagatggaattagacacgcaagagattgattgactgggggacacatctgtgaaaggtaaagagaacgccttcagagtacagctcagacctgatacctgtgggaggagtgaggggaggaaggaggcctggggaggagcaatctcagggaagcccagcagatggagatcttcaaggcaaaggagcattcactctgctcagtgatggactgggagcagcttgaggagtgcagtgggggtgctgggggctccctgtgagggctgaaacagatcagaatatgcagaacgcagtgcaccagtttctctctatgcggcaggttgccttgaagggagatcagagcagcgtactttgtagctgcacagtattccctcttggggacatctctttcctcccattgcctccttctccctctccccacactgtgtagctccttagtctcttctccttcaggcctcagcatcccctctccctggtctgtccgactctcccccacctcagtctccatttgtgtcatgaaaaatctatgggccccatccaggtgcacaaaagtcacagccaggctctctcctgcccactctgctgtggaggtggaggggagagccctgagccctgaggatggaggcatggagaaaagaaattaggatggtcttgactcaaagtgacagctcacttttcttttctctttctgattttcctttgtcagccttggacatctgaaaataaactggtcctctggcaccatgagggttaatctctgccattaacttcccctggcctgcaagagatgtccttcctgcaggcacaacagtgggacaacatgttgctaatagagagtcagtaacctgaattgcattacaaaacagctccggtaaattagccttgggaagtgccctgcccacttgctgggtatatttttgcttgtatgtagcaggcagaagagggaagggctgtccagctcccaagcaactcccgaaactctgtcttccattcggaaggctggactttgcatcactcaactttgtttcttttcacacattcccgattctaaccctaaatagatttaatacaaaataaaccccaccccagattaaaatagtatattatttgtgctttatatgagtctcagaaattactttcaataatctctgtataaagttttaaaaccctaaactagagttaaacttgtggaaaagaaaggaagaagtgaatggttaacaccaattcacagtaggtattttactttgtaataatactgctgaatttctttctttacaaaaaaaagcatgcatttataatccttgatgatcacaacaaccccttgataataaaattaagtttatgacatgcattactgaaaactttaaaatgaggcatctagagcccagagtgattaagcaacttactcaaggtcacacaggaagtgattaggaaagctggaacaactctttggccttttggatcagacctctatgctgaaaaagaatcctgagtttcaagtctggaagatgaggaaggaagccgtgatgtttggagacagagtgtgccttctatagctcaagataaaattctgttataggaagaagctcagatttcttaaataccaagatttgatcccaagtcaatgaccaataaaagcttattatctgcaaccatgtcagactctggcccaagagtttaatctttctaatcacatattctatacattattcgagaaagaaaggtccggaaaagcatccctaaagactcaaatattccaaggagcaaaaaatatagataagacaaagctccaaagactcctaacagtggaaatagctgtcagatgttatagagaagggagctgatgggttcccacatgctattaacaaaccatgaagaagtcccttagcctttggacctggagttctcaaccctggctgcacattagaatcacctgggaagcttctgaaactcccaatacccaagacatacccaggaccatttatatcagaatcttccagcgatggaagcctggtgttgggaagtctttaaggctccccagctgactccaatgtgtagccaaggttaagaaccatggctctaggacctaacacataagttgaatgaatagacggatgaatgaatatcagcaacagaattgaaaaaagaagaaacaattaagaaactaaatttgatgttatttactcagatggaagaccctgaggtcctcactcaaaatgcgtatgctgttcacgcagaagcagttctatgaagtttggatgtcaagattctcagctcacaacagggatgagaagagaagatggttctctgtggagcagagtcaccaacaatagcaggaaggacaaatgtgacagcctgaaagacaagtaagaaatgcaaatcctacttctatggttgaatgtgtccccctaaattcatgtgttggcaactgaatccccaatgctagttttgagaggtgggtggtgttaatcacctttaagaggtgattaggtcatgaggctctgcccttataaatggattaatgtcgttagggtgggagagggttagttatcgcaagagtgggttcctgataaaaaaggatgaatttggcatccttcccctttctctttctcacatgtactctattgtccttccaccttccaccatgggatgaccagtaaggccctcactagattgtagccaccttgacctgggacttcccagcctccagaatgtaagagataaatctttgttctttataaattaccgagtctttggtattctattataacaacacagactaagacacctataaagcaggagacagaactcagcgaagagttgtctggggccctttaataccagggtaaactgacctgcccagcccagtttccctggaggcgtcattgtattagcagaacagtgcagttaattggtgttcgggtgcctgagtcacccagcggaggcgaagttctgttctctctacactgtgtaagaactcacaggaggatgggcagagcactcgacttcctcagcactggctatcacagactgcccttactagaactgcgtctgtttttgaaagcctgggtgggtttaatagttggtaaaagcagcatgttaaagttggcagcagaaactgcctcctaagagaatcacttcctaagaggggaatatgaaatttctcattgaggcaggctgtccccttctgtccctttgtcagggaaagcctctctctgggggaaagcaaaggtggagctggggtgcatagacctctgtggagagaaaacctgaatttggcaaagtggtcctcttacagatttcttagtctgaggagttaagctttttcttggttttgcaaattcagtgtctcttttggcagacatttgttattagaagagatctgtactttctcagcagggagtgacattgctctgtgtccttaagatattgcctgttctagggagttgggtatgttctccaacaagctggagacctagatctgtatttccgtgggaacaggaggcctctgcagacttgaacttgacctcacactaaaggaaagcctgtgcgaaggaagaggacaatcttagaggcagtcatttaagtctgagtgccccagaacacagggatgttgggtggctactttctggtgccatttcatttgtcccactcaaggccataatgcaagcttggggaggaggaactcccctgagaaaagagaccatccctgctgataatcctactaacctgattctaggtcagtaaatgaaaacttgaaaggtgaatttcagactggagaaggcagcggggaaagggactcaagtccgtttttctcggaccaatggcagtgtatggtaatgtggggctagccctgacatcgggaagacagttaagagccaaacatggtgaggaactctggggctgggtcaaggctgggtcaaggctggaagctcagagccacatctatttggaagtatcagctgttctttgggttgtattttcttttttctgtcccctgaacaatatatcaaggaagtttggctgcaagtaactgcctggtccctgagatgctttggggagaatggggaaggcaggtctggaagggagcacaaaagatggcaagagagttgctatgagcaggggtcaccagcagagggcagagggcagaggtgcccaacggagcagagagtgctcaatggccatgggcggcaaagggtgcagtggggtcgcagtcaaaatgcaggctgagggggacctgggcatgtgggcaacggcatcatggcgctcacagaactctttagaggatacactgaagggcaccaatccctgacaattagcaagtcaggatcgaagccaacataattcgagtatttcatggaaacaatatctaactacaaacagctgggtcttcaacaggtgggaaacactgggaattgaagacttgtgttcagaaattctatctaccagctcccagccatgggacttcaggcagttcccctgcgccacccagtctcggtgcctcatacgacaaacaggtgcctgacatttaccctacagacctcttgaggttgttgttttaagtagcaaaggcaataaagctcacgtatattttgtaaatggtaaaatactttgcagacttaacacactattttatcttggaaagtttttccaactgaaatgatgaaccaggttaaacattttttgacttttacctgtgatcctaacaggcactctgggggattctatctggcaagtgtgggaaacacagctggcatctctcctggtccactggcctcccatggggggaaggacagtccctaggaagcagcccatggatatagggaggaggtgtggggtggcacactcatctctgacttacaggaaaaacagaaactttctctaaagcaaataaaatgcagaaaatgcagctcagcatataaccaagataaccaagcagagaaaaatatttaagtcacaaattggcagtttaaggagtatcagcattctgagggaaaattcaggagacagctgatgaatccacaagttcttactcaattaactttaattggctagtatctgataggcagctgttttaggcagggcatgatggaagttataatgttaaacagaaatagatgtcagctttgcccttagggaaccatatatatatatatttgtttttgtttttgtttttgttttaagagactggtcttgctccgtcatccaggctggagtgcaatggcatcattatagctcactgcagcctcgaacttgtgggctcaagcacactgcagcctcgaacttgtgggctcaagcaatcttcctacctcagcctcccaagtagctgtgactacaggtgtgtaccatcacccccaattaatttttaaaatttttgtagagacagagtcttgctatgttgcccagattggtctcgaactcctggcctcaaatgatcctcctgcctcagcctcccaaagcactgggattacaggaggagctgcaatttttgagagagaaaaattgacatgtgcaagagcagcaacaggccaaacatgagccatgagatcctacacctataccatccaatatgggagcaggccatgagccacatatgggcagtgaactctagaaattcaggccactttgagaggtgctgcacatgtaaaatacactccagagtccaaaagcttggtacaaaaaaagagaatgtaaaatgtctcattaatcaatttcacactgattacatgttggagtgatatttttagtatattgggttagataaaaaatattagtaagttttttttaaaaaatgcttttcattaaacatcagttatctgatacatttatttatgtgggatcctcctacccaaataagctttaattagatgttgttgtgctcctgttaaattcaattctgtggagtttagcaccactgccaagagcctccttcttagcacgtctcttcttcctctttagcggcagttctcaaaatgtagttagaaggcagagactctgttttcacctgaatttaatctaaatctgattccaatcaagatccagataaaatgcttgttacttatctcagcagctagtttcccagattcagggagtaacataaaacacctgcctagcaatagcagaattctaatgttttgaatgccttgggccagggacacttttgtcactattcagtttcagccatcaatgaaaactccttcttcttagctacctggtatggacggttgactaactggttgaaaaacagtcaacagtctggttagcgtctttgaagcttcctgaggatgtgtaccactcagtcataccttcaccgtgcttacaagagcatctgttgtgtatgtagtggctgccccacaagtagttgtattgataaattctaaatgttgctattctttttttttttttttaaagagtctccttttttttttttttttttttttttttttttttttttttgagatggagtcttgctctgtcgcccaggctggagtgcagtggcgtgatcttggctcactgcaagctccgcctcctgggttcacgccattctcctggctcaacctcccaagtagctgggactacaggcgcccgccaccaagcccggctaattttttgtatttttagtagagacggggtttcaccgtgttagccaggatggtctcgatctcctgacctcgtgatcgcccgcctcagcctcccaaagtgctgggattacaggcgtgagccaccgcgcccggcctaaacgttgctattctttagaaaggctaaagtccagcccctgaaagaagcctggaggctaatgttttctctttcaaatggttagtgatgaaaactgaaccctttggagattctgattttattctgcttataaaagctaaacttgaacttcactggatagggtggattgtatgcaggtcctgataaaatccctacacaatttccctcccttctaggctgacctgccgtgcctgcagcccacaagccacccccttcttttcccacgcatggcccaaagctacgagctctcagagtttttccttcttgcagcacgagatgacacaaagataggttctggcagttgcaggtacgttcacctcagcaattctagaaaatgccttgtaattactaagcagaaagcacacaatctgagggggctggagaactaagtcttcacataacaaaatctgcttctatatggcattttatatcttccagtgtgatggggaaatgggaacgctttgaacagctgaccagatgaattttaaacaagaattggtaaaaattggactattagagattttgagcattttcttgtggatttattggccatttgtgcatctttgtgaagtgtctgttgaggtttttttctgccattttaaattgggttgtttgtctttttattgttggcatgtatgcattctttaaaaattgagatgtaattaaagcctaaaagcattctttatatattttagatacaagtcatttgcgaaatatatgtgttccaagcatttttttcccagccagtggtttgtcatctcttttcatgagctgaaattttacattttgataaaatccaattttttttatggttagtgctttttgtgttctgtccaaggactctgcccaccccaaggtcatgaagttattatgctttatttgagtaattttgtggctgtggttattacatttaggtgtatgatctattttgaattaactttgataaatggagtgagatagggattggagctcatttttttccacacatatatccagttgttccagcaatattgttaaaaagactttcctttccccattgaattagcaccaacaactggaaataatccaaatgtccagatataggtaaatggataaacacattttagtctattcagtggaataatggaataataaaatacattccatcattggattctaattccagtaatagaatacattcatggaacaatgaaatatattcagcaaatttttttaaaaagcaaactataaatacatgcaacaagctgaatgaatctcaaagacattatttgaatgaaaggagctaaaagcaaaagagttcttactgtatgcttctacatacatgaaattctaaaacagacacaactgattctatagtaacagaaagaaaatcagcagtttcccggttgagggtagggatggaaacttttctggcacgatgaaaatgttctatatcttgttttgagtgttggttacatggacatttacaattgtcaaagtttatttgtctgaaacatctaagggctacacgtttcactgtgtgttaattacacctccatttaaaatatattaaagaaaaaaaaggattagaatgtgaaccttcctggactgtaccttacaataaatagcgaaattcctctctctccgcagatgccttgctgttggaggctgggaaaggaagatgaaatgtgcagagcccttgacttctcccttttcttaagactgtgggataaatttttcaaaacattggctaggagacttgcattcaaaaccagctgagtaaataatggggctttggtgagttgttttttcccttctgtgtttggaaatttgagcctggtgtatctttttcaagcacatctcatttagaggataatttacatttgcacaaaatcatggctacagcccatctgctcaacgattatgtaagatccaacactcattagagtgtgacatgcattgatcttagtgagcatatgaacttgtgtgcttgggattcaagttcttctaaaataacttccagcaccaaccagctaccatagcctgttgtttctgacattttccttggaacatgacagttaatatccatttgaaagaaactaaattattggggggctttaaattcctaatggctatagcagattttctggtagagttaagcaagattgagttggcagttgtgaaagggcggaggctagaaggagagctgtttgttttttgtacctgatggttttatcaccaaagagtatttgtaataatgaaacagctggagcagtaacatgattcatattaatatatgcatgtaaatgggttaggaatggaattaacataatttctgtgctctggttttcccttagaagtggagactactggtttatttacagtctgcaatgagcacagccaggcagttctgctgctggacagatggcagggaaggccaggccatgtgctgtggatcagggggtgaatgtgaacatgacggtggatggcacagctctgcaaaggggctggccagaagcagagagcagatgaaaacaaaggttccttttgtctcccagagttcttagcccttcccatttagtccctttgtcctagttcctcctgccagggctttgcagagaaggggagtggggagatacagggagaggccaggaccaggggttccaaggcagaacctcgtgggaggaagtgaccagaggaggggctgcagtcactagactcagggcactggcaggaagcaggaactgtgaccaggtgagaaggtgggctcagagacactggagaggaaggacaggtcgaggaaatggtccacaggccagtcagcctctcaaagctgagggaggcaggcagtgagagggcccaggaaacaccctgctatcaggacagaaatctggccgggggacaggaagttgagtgtgacgcaccaggagactttgaagcctgtgataccaagaggaaatcctaggccatttagcaaagaacagaatttggccccacgacacagaggcccttgggaggaaagtgaatgcctaaatagaaaacaggcctggggaggccactatagggtggtcttctgtattttttccctctccgttttccattataattcatctccttccaaggccaggttcactcccacgataagagaggcaaagcccctggtcagaagggaagaagcctccatccccagcccatgtctgtctgtctcatttgtgtgtgtgtgtgtcttggggggaagtgaatggagaaagataccggaagtattacagtgatggttgtcccccatgtgggaacatggagtaagagggaaagtcatttgaggaactgcccagctgttctccaccatggctgcaccatttacattcccactagcaatgtataagagttacaatttatccccatcctcaccaatactttttattttctgtctttttcatcttagctatcctcatgagtgtaaaattgtgagtttaatttatatttttctaatgactaatgatgctgagcatcttttcatgtgcttacaggctatttatatatcttcttagaagaaatgtctgtttaaatcccttgctcatttttaaattgttttttaaaaattgttaaattgtaagaattccatgtatattctggatacaaattcctagtcagtagacaatgtgcaaatattttcttccattctgtggggtgtcctttcactttcttggtagtgttctttgaagcacacacatttttaattttgaaggagtccaacttaactatttttctttggttgcttgtgctttaggcatcacatctaagaaaccattggctactccaaggtcatgaagatttatgctcatgttttcttctaagtgttttatagttttatcttttacatacaggtctatgatccattttgtgttaatttttgtatacagcgtgagatggagttgaaaattcattctttagcatgtggttatgcagttgtcctagcaccatttgttgcaaagactcttctttctccattgaattgtctttgtgaccttgtcaaaaattaattaaccataaatataaagatttgtttctggactctcaatcctattccattgatctatatatctatccttaggccagtatcttccagaggcaaaagatcatcagggtggcttttagcagtgggaatcccagaagagcccacaaggcacccaatagacacagtcgtttcagagagtgcaaagccagctcacatggtaccagtgaaggaccctacaggtgctagaggatttctggatgcaccatgaaaaggggacaggacccttagaggggaatagagtagacttttttctttactccccattaccaacaaggtgggggcaagcctttgcactcagcagtaacttgagcacatgagttttgccctagacattctaaagtgttgtttagtgacatagaggatatgtataggacttgattacagttttgctttgactctggccataagtacttttctggctacatcttactcttgcacttgtcctgccttgtcttcccagcagatctcagactctctatgcctgcctctccctggctccatgttgcactggggtccacagttcagctcagccagggtgtgtgatggccaactctcctcatgcctccagccctcccttgaccatctccactctgatattcccagaggcactggtttcctggggctgctgttagaaattaccacaaacttagtgccttaaaacaacacaaatttattctctcacagttctggaagtcagagtttgaaattagttttattggatgaaagtcaaagtgttggtagggctggttccttctggaagctctaagggagaatctatttccttgccttttttacttctagatgccacctacatcccttggctcaggtccccttcctccatattcaaagcggccatgaagcatcttgcttctatagttgtatgtcttctgtcttatatggtcaaatctccctctgccctcctcttgtaaggacacttatgattacatttaagacttggataatccaggatgatgtcttgatctccagctcaacttaatcacacctgcaaagtccctttgctatataaggtaacactcacagcttctggggactaggacaacagggcattagtcagctttccacaccaggtgggatgcgtgcagctgtactggctaatcagagctgatgcctgttctgactggttgggttctgtgccaggtgtctatattttacttcgctctgagcagttatcaaatattttgaatatgatccttgttgtcagccttctttgttaaagagatgagtagacatgaatctgtagaagcctggggaaacaaagtgtgaaaccgattggtgtcctcctgtaaaaaaggcaagcgtgagtcaagaaaaggaaaatcatacaatagaaaagtccagggacaggtcagtcatatggatctgaaatatctgagatggttaagagaaaagccacagaaaagtgaagagcaaagtgtcttggcctgctgagcgggtaataaacaacagagagcttcctgcagtttcaatttaacctgaatcccacgtggagagacagcctggagccaaccaagaagggcttgtttctgtgcaagaaagatatggtagagcctagggccagcctggaagctggactccggatgagactgaacagaatgagctagaactgagatgcaaatgtaggacatttatttcccacacaggtccctgaacctgtacagcaactcctgccttcctttggtggcattgcctcccagagagtaatcactggatccatcagtcacacagaatcattccggagaatggaggttctgggcctcttcccataatcatcagactctccaggggtgggattctggaatctacattttaataagaacagataattcttaacatgctaaagttcccaggcaggagcactttaactgttatatttaggagacttaggagcataatcttttcataggattctgtacaaatggtttggagtcagccatgaatgcaagtgaaatagtcataaccgtcatggggagagaccccatagtcatgtgagacgtgaaggtttctaccgcactggccaactgtgattgattgatggtggatacctggatcatggtgttgagataaatgatgaggctttgcctgagctgggacaggaagagagcagcaattaattagtaatgtctgccatggctataggttggagatggtggttggtggtgaacaagtgcctcctatctgccattttctcctagaaagacctcactgtaccttctcattttatgatgagatgaaatgtacatacaaaacactggatagaaacatacatgtacagtttgaagaacaaaaataaaacaattctttaaaaattgtctctagtgagctggttccaacatctccttgggtaacacgttgcattgtctcacaacttgcttaatgtctaatttaaataaatcccttttggcacagtttaagtccagtccctttcattctatcctcagagaaaaacagaacagctgctcctgctctcctattcaatatgcttccctattttaaagaattcagttcttcagaaaaaaattaatgagactcttctattttaatgagttacttgtttggtggattggcacttttcctcccccaagctcaacattcttggttacagaaatgaattagaatagaacattgagagtagaaggaatttagatgtcattcaattctctgttttcacagatgggacaagaggcccagggaaatggaggacctgacttgctcacacagcagaatcagaactaagacccaaccatcctacctttcagctgagagtaacttctaccagatcacgatatttggatacgcagtgtgttttgaagttggagaagaaatccaagaccaaacacgtattgaggtttattttccatcacctcagtggcttccattctccagcttctgagtctttttgtttgtttttgtttttttgagacatggtctcactttgtcaccaaggctgaagtgcagtggtgcgatctccactcactgtagccttgacctcccaggttcaagtgatcctcctgcatcggccccccaagtagcatggactacaggcacatgccaccatgcctggctaatttttgtatttttagtagagatgaggtttcaccatgttgcctaggctgttcttgaactcctggactcgaacgatctgcttgttttggtctcttaaagtgctaggattacaggcatgagccactgtgctgggcctggcttctgagactttttgccagagggcttcagacccacacctggggcaggccaaaagcactgggggcttcattccccaggagcaatgcttaaggagtgtgggtcgggaatgggtggataaatgctcctgattcttcaccgcttccttgatgtcgtgattctggggtatgtgttccctggtgactcagaggctcctcagcagatctgatccccagttgcccaccccagtgactctctcgttaatgtacccttcatgaacttccctcctgccctctatcctttccctacttcctcattatgctttctgagattatctcccaaataaattatttatacccccatccttccttccggaccttcttttggggaaatgagaacatttccatacttataagaccatacttataagaaaagagcataccaggaagctcgaccagagctgtgaagccggaagtttgcctgcgaatggatttccaatgctgtaatcctcaggatcagctttgccactcacagagccaagtacaaagtgaaaatggggagtccctggttgggaaagcactaagactttcaagatgatgacagcagagcattaaaccatgggcagaggccaggcatgagggctcacgcctgttatcccaggactttgggaggctgaagcgggcagatgacttgaggctaggagtttgagaccagcctgaccaacatggtgaaaccccgtctctactaaaaatacaaaaaattagccggtcgtggtggcatgtgcttgtagtcccagctactgggaggctgaagcaggagaactgcttgaaccagggaggcgggggtttcagtgagccaagatcacaccactacacaccagcctgggtgacagagcaagactctctttcaaaacaaacaaaaaaacaaacccacagcagtgctctcctgagtatgcagcctgcagcgtgagtgactacacaggttgcacagccatgaagctggccccgctaatctctctgtaagaattactgtaacactgatgacaccatttgctgagtcattactgtgtgccaggcaatgtgttggactctagattgcatcatgaatactgtaggggaggaaaagatttttttcctcgctcaccacaaggtttatggctgaggcctttataacaagacagattaaaccatacacatttgtttagtataagtttcacatgacacagaagcctttaaaactgaagacccagccgggtatcctggtgtatgcctgtggtcccagctagttgggaggctgaggtgagaggaccctttgagcctgggaggtcgaggctgcagtgagccgagatcgcacacctgcactccagtctgggtgacagagtgagaccctcagtcaaaaaaataaaagaaaaaaaaaagaaaagaaaagtcatcagtacccaatgatagtcactgtaaatattgtgtttcctttcagtctttgttgttgttgttgttactgtgtactcttttacatctacctttatcaaagctaagatgataggcagcctttttcatttaacagcagtgttaaattagtatattcccattttattgaagttttttgaagaccttttcaaatagcagcttattatgcaacgtgtgaacagtaatttaacaattctcccattcagagatgtgtaaatttgtttctgttttttcaatttatcaataatttactggcacagccttgcacccctgctgcagtgtaagacagtaccctgtgaccttgtctcttttagcattggtataaaattttaaaaatttttttggataattttataagcaatttataatttataatttttatttatttattttgagaaagggtttcactcctgtcacccaggctggagtgcagaggtaagatcacagctcactgcagcctccacctcctgggaccaagtgatcctcccacctcggcctcctgagtaattgaaaccacctggtgtgtaccacctcaccaggctaatttttcttttttgatttttttgtagagatgaagtctcgctatgttgctcaggctggtcttaaactcctggactcaagcgaccctcccacctcagcctcccaaagtgctaggattacaggtggaagccaccttgccttgcctgaaggcaattttttaaaggcatgtctcagagaggagttttgagtaatggcctaatgtgttggaactgagagtatgtaacttcaccaggtggctattttaaagaaaaccacagacacctggatataaaagttttgaaatatggatttttaaaaacccatctatgactttgccatcatccccgtagttaatactgtaaatgatcaatgacagaagaaatcaggatgttatgagcaggatcttcagtgtttgtaaggaaacctgcaggatgtgtggctgggctgaactgtgcccaagcacactttgttcagtgcagtttagaaatggcttgtgatggttgggtactgtgttgcctttgctttatgaacactttagaaagctttgcactgtgtggtaataagtaggtttttcttctttttctctttctttctttcttttctttttttcttttttcttttttttcttttttttttttttgcagttgcattttgttgttgttgttccctcatttgtttttgttatcttgcatccaaatacccttcctcctcagcagcaatgttgaaatatcaggcaagtaggtgttacaccccatgatgtgaggagaagggaggcagaggttccctctcactactccttggtgatgagagatgagcttagacctggccaatcgtgttctccacccgggactctgactctcaagaagtgatacaaagatacagtgaagattgacccctgccaaggcagcaggtgttcagtggcccgtgggggaacgtctgggggtggggctgtgaggcagtggcagtggcctagcagatggtccctctctgtggattttggcagtgttcttggctgctggtgctccttttattctcaacccatttccaagccatgctcttcaatgttcccattaatttcatacaccctttccatacatcgtgtttcctacttcagtttgccagagttgacttgtgtttgttgtcaccaagaaacccggactctgctccttgtcaattatggtgtttattttaatttgtttctaaaactaagtatgaagaattggtcaggacctgtatttctttttgtgtgtgtgtgagacagagtctcactctgttgcccaggctggagtgcagtggtacaatctcagctcactgcaacctccacctcccaggttcaagtgattctcgtgcctcagcctcctgagtagctgggactacaggtttgtgccatcatgccccattaatttttgtatttttagtagagacggggttttgccattttggccaggctggtctcgaacgcctgacctcaggtgatctactcagcctcccaaagtgctgggattacaggtgtgagccaccgcgcccagctgcaaataccatttttatgggaaaataagatgggccccaaagcaccttgttaaggatcataatctggcataaacacagcccatttgtgaactggaagcacttgtcttcactgccttttgtcaatactaaatcccattgtgtcttcatgtttttttacacagcccacatttcgagatttactctttaaaaaaaacccaaaccttgtgacatctttgtgtccacatcctttgccaagaactctatgctcatgttcttcacttctataaacttagcttcctgactccgctaccagaccctcgcccaggactttgaacatagaactcctattctttccagcccatgatgatttctcagagaaaccatcaaatgcagaactgatctccttccaccaagtgtcctccccatctgcatgccaggtcttaggcctgaccttgtcagccatgaactagttttgcccaagcctagcacagcagcattgaccaaagagtcctttgtgttccagagcttacaagtctattaccaaccaaatatagatgtttcctgtgtcctccagggaaaagttctccaagtattgcttttacactagggtatatctggaagagcaaacatgcaagaacaaaacattcaggaatattctgaaaaaagggtaatggaaaggacttgccctactagcaattacaatttattagaaagcaaactcatataaaaatatgggtattgtggtaataaacaggccaatggaatagagcttcagaatgggaattagaaccaggagggaaagatatcttctttaatacatggcatcaatggacagttaactagctatttggagaaaaaatttcagcgggctccaacatgggagggtgatatgcttgatgtaaagatgccaacaaatgtagccaaggatataaagtttctttaatggcaggggatactgaaaagtgtctgaaaatcatgcccacacaaagtggattgagggcgcccaggtggaggctcccaggcccctgcacgtcccatgagaacacaggtgcctggaataccaatctcctagtaagagaagcgtgcacccgcctgttcttgggggactttgtgccctacctggactctcctacctgttctggagaccctggctatgtgcctagtattcatcaggtctaagcaacttgttcaaaacagctccaggactttcttaaatgtttgctgcaaggcaaggtaaattgaagctcaacttctcaggatgtgactgtcttctggcaggaccaggcctcaggcctgctggagagtgcttcctctattctcctatctcaccccttatatcagaatatcttccagccagaccaaagatttatatatatataatgaatattggcaataatagtactaatgtagagaaagctctgagaaaagcatgagtaacacttctgaaaaatgggcaaaggatatgaaaaattcaaagagggcaaaatacaagtgcgagtacatgcatgaagagatactgtcattctcaaatgattatgtaaatgcatttctaaacagtgactcagcatgtttcaatgattagattggcaaagattaaaaacattgagaatctacaatgttagtgagagtgtggtatgtagaaattcttatttacttttggagaatgttagtaaagttatcttgaagaggaatttggttgaaactatcagaagtttcagggtacattgctggtaggaattaaaaaatggtacaaccattttgggaactagatactttcttataaagttaaatatacacctactgtatgaaccaaccagtcattacacttataggtgctcaaggtccatggaaacaaatatccacacaataccatgtacaaagatatttgtagcagctttattcactgtagcttaaaactgaaaacaacccagaaatctgtccaccaaaaaatgcataaacaaattgtggcctacctatactgtccattccatccaccggatactactcatcagtgaaaatgaaggaagtactaatatgtacaacaacacatgaatctcaagggaagccagaagccagagcccatgctgggtgtagaactcttctttatagaagatctagaaaatgggccaggcacactggctcatacctgtaatcccagtgctttaggagaccagcctgggcaacatagcaagacctcatctccactataaacttaaaaaatttagccaggtgatttggcatgcacctgtagtcccagctacttgggagactgaggcgggaggatggcttgagcccaggaagttaaggctacagtgagccgtaattgcaccactgcactccagcttgggcaacagagcaagaccctgcctcataaaaataaaaataaaaatctagaaaatgtaggccaatgtatagtggcagaaagcagatcagtgtttgcctggagcaggatataaatggggggatagactacgaatggaaaagaagaatggaaatattctgtatgttgataatgctagtggccttacaggtgtatatattaatatatattcacaaatgtgtatacataaacacaggtattatatatatgttaagactcattaaattgtacattttatataggcccatttctgtaaattatatctcaacaaaattgattttataattacatcaaaaagatacctgtattgctatgtttattgcagcactgttcacaatagcaaagagatggaatcaacctaagtgtcgatcaatggatgattggataaagaaaatatggtgcatatacaccctggaatactactcagccataaaaaagaatgaaatcatgtattttacagcaacatgtgtggaactgaaggccattatcttacatgaaatatctcagaaatggaaagtcaaataccacatgttctcacatataagtgggagctaaataatgtgtatatatggacacagagtttggaataatagacattggagacttgaaagggtgggagggtgggagggggtgagggatgagaaattacataatgaatacaatgtaaatacactattcaggtgatggttacactagaagcccagattttaccactatgcaatatatccaggtaacaaaattgcacttgtacccctcaatctatacaaaatttttaaaaatggaaaaaaatgatttaaaaagttaaagaatgcattctctttgatccagcgattccacttccaggaatttaccgtacatagatattcacacaactgtgcaaatatgcaggcataagggtgtgcattgcatgatagtttgtagttgtgcaaccattgaaaatggccaaactatccaccaagagggcagtagataaacaaccaaaggtgaaagagctgctatagcctgtcctgtaaactccaagagggctgtgtctccagacctcacacagtgctgggcatactttatgcagggatgtggaaagggagtcaaggtatattaggtaaaaaaaaaaaatcaacttttaacttttaggaatagatgaacccactagaatggaactatttatgttagagccagaattaatttggtgtctttaggattatgtgagaagactgagggtcttgtaggaagactttgttcttgggtgaggctgagacatccctgggagagttgaaacaggatgagctgctgtttgctgcagggagatcaaaggaagagttcagatgcagacaagtgagggctaagtgtcccgccatagaggggtttagtccactgcagtgccctgtgacaggggcctcagagaaccacagcaacacagggctgtcagaaagggaaaagggtccatgccctactcactgggacctgggacctgtgcaggtggagccaaacaaggttggttcaggtgaaggcaatgagcaccaggggtttggcctgcttggttcctatccaggttgtcatcggctccagcaggtctcatccaaggggcagacctccaagacctcagcatttcagcagcagtcggagaggtgggaaagagcaaaggaagcaaaagcagaactaacatgctggatgaaggaatccatttcccaagtccccagggtcagaatgtcttcatctcttgagggatagattccctgcaacagaaacaggactggggccagactcatctcccctctctccatctcccctctctccatctcccctctcttccccatctcctcttgatgggaaaggcccaggctgagtgcagagcaagcaacgaatcattgcatgatgaggaaggatggtgcagtctcttccaggcctcgtgctctgggcttccaggcctggtcctatagtcatgaggctctggaaccggggaggggaggaagtctgtatttcaaagtcctctgtgcccttcctttgcatggaaggtgacggtttgtgttgttgggatcaagttgacatcactaggaaggtgtccttagtcataagggtcatggagaagcagtaacacgtgccactggattaatggtcttggtgctggaagacagtccagaaattttttggaaggaaaagtagaaaagtgatatcaagccaatgcttatccttggtctgtgactttcagagatttccaggagctgctgtttcttgatttgagttctagaggctgctctggcctgtaggtaggacagacactgtaatttgaccccagagaccatgggatgttcctaaaagtagttatccttggctggagcactaactggtgtcaggagagctggcaaacttcttggatggtgtactacgttgaatagtgactccctcaaaattcacgttcatctagaacctcagaatgtgactttatttggaaacatctttgcagatgtggtcaagttaaggtaacatcatattggattagtgtgggccctaaagccaaggtctggtgtccttatgaggaaagagagatttggagacacaaacacagagacacacagagaaggcaacgggacaacagaggcagagattggagtgatgtgtctgcaagacaaggaagtccatggatggttcgttccagcagacattgaaaggggcaaggaaggatccattccaagtgtcttaagagagtgcctggactggttggccccttgagttcagatttctagccttcagaacagtgaggaaatatggctgggtgtggtggctcactcttgcaatcccagcactttgggaggctgaggtgggtgtatcacttcaggccaggagtacaagaccagcctggccaacatggtgaaactctgtctctactaaaaatacaaaaattagccgggcatggtggtgcacacctgtaatcccagctactcaggaggctgaggcacaagaatcacttgaatccgggagacagagactgcagttaagcgccactgcactccagcctgggtgacagagcaagactctgtctcaaaaaaaaaaaaaaaaagaaaagaaagaaaagaaaaaggaaaataaactaaactgctgttattttaagccacccaccttcttgtgccacttaatggcaaaccaaggaaacgaatatataatacataatactactaatatataattctgatactactaattctaatatataatgataaccttagttcttgtggaaggaggtatgaaggagtacatcacattattttcaagggcaaacagtggtggaaaaaaagctgaattttaagttactaaatttagagaattagtaggaatttgcatcacacgagggtgtcttttactgtcagatcagcaattagagcagaggcttggatctggtagacttggggtcaggtgccagctccctcacttaccgtctgtgtgaccttggggacactgcttctctgggggtcagttttctcatctttaaacctagaacaataatagtttcatctcaaagtgttgctgcgagaattatataaaaccaaggtgtggcgcatcatggaggggtctggcccctcaaaaatgcttacacgtagcgttgctattattgtttttaagttacagacacaatgattttttttttcaataaacttgattcagttggcacacatgcacacaaaatacatagatcttgaccaggccagcatgtggacacagtctttccagagctcgtgagatgacaaatctctttattggggtattaatgtcaggtccaggagattcaatattcaatccactcatcaaggtcgtctgtgtagacagccattcactacctatagacgctcctcaagaaacagatgctttctggttttctgccaagaatgtcaacatcagattactcctaagtatcactcatttccacgtgaattagacagaacagtgttaagtggtttggagccacagctggctctcaatactgcttcaactcacactctgagaagaacgacagttgactgagccagcttccacacctctcaagagagtttgctgttttattccaaggggcagtaacaggaacatttctgcttgctgcggcccctaaatgtgcagcattctttagaccattatatggtgctttccccttctcagcgttcagaaacgttgagaaggaaagagcctcatcctattttttagcttcttggaggttgcagttgcttatcttttttctccactgggatatatttttctcttgcccattttttatgctgaattttctaaactcctttataatgcttttgctggtgagttacctttggaatgaatcaagtactttcactttctctatccagaagggtggttcacatttgctaccagtctattgggaagatctgggctcaggacaccccccacagattactgcaatactttccaaacatgtgcatttatcctgtaaccaccgattactgtaacactttctaaagatttgcatttatcctgtacctatatataacttaaggtctgcttacactctgaagactataaatagattcccacctgttgggctggtttccaggaaagatgcagggcccaggcacctagttctctcattggttaaaatgtaagtattagtaccttctttcttcttcttttttttttttttttttgagaagaggtctcgccttgtcacccaggctggagtgcatggtgtgatcatagctcactgcagcattggactcctgggctcaagcgatcctcctacgtcagtctcctaagtagctggaactataggcacctgccaccacgcccatctaattgttttatgtttttgtttgtttgttttttgtttttgtagtgatggggtcttgctatattgcctaggctggtcttgaactcctgggctcaagtgatctcacctcggcctcccaaagtgctgagattatagttgtgagtcaccatgtccagtccccttctccctctttcttttcttcttaattaaaagtaatttacatgacagcaattcttgtacacactacccagatttaatgtgttaacacttcaccttattgcttcaaacattgtagatacaacttaagaacccctgccctcctctttcttgtaccctcagaggtaattatcatcatttatattttcccagaaatgtttttgtatttttgctccacttaatggctgaggggctggggaaatggtattatattcattgccatttccttctttccatttcttttggggactctgtgctttttgaatgaaaggaaatacaaagggacttcacaaagttcatggaaaaatggaattaaaagctaaaagtaaaaaaatatataaactttatttctcaacatttgctccatcaagttgaagacacttgtaagcgatgatactaaccatttagttcgtccctaaaaaactgagggtcagtgccaggcatggtgggtcctgcctgtaattccagtactttggaaggctgaggcaatattgcttgaagccaggacttcaagaccaacctgaactacatagcaagacccccatctctaaaaacaataaaataaatagccagatgagttggtgcgtacctatagtcccagctacttgggaagctaagacaggaagatcacttgagcctaggagtttgagggtgcagtgagctatgatcatgtcactgctctccagcctgggtgatagagtgagacttcatctcaaaaaaaaaaaaaaaaaaaaaaaaaactgagggaatttaagcatgtcagtatagtcttttttacattagtaattgaagaaaaatggttgtcttttaacaaaaaaggcagaagaagccaaatcaggacagtaaggtggatgcctaatggtttcccaccaaaactctcacaaaattatctttgtttgatgagaggaatgaacaggagcactgtcatgatggggaagggctctctggtgaagctctcccaggtgtttttctgctaaagctttggctaaccttctcaaaacatctcctaacaagcagatgtcatcattctttggccctccagaaagtcaacaggagaaatggcttgagcattccaagaaactcttgctgtgacatttgcttttgatggatccattttggctttgactgggccacttccacctcttggtagccattggtttgactgtgctttatcttcaggattgtactgacaaagccatgtttcatctcttgctacaattcttcaaataaatgcttcaggatctggatctcactcatttcatatgtccattgagagctctgcccttgtctgcggctgatctgggcacaatggtttttggcacttatggaatagaaagttagctcaactttaacttttcagtcataattgtgtaagctgaaccagtccagatatctgtggtgttggctattgtttgtactcttaatcatcaatcctcttcaattagggcatgaacaagatgaattttttccttgcaaattgatgtggatggcctgccactatggacttcatcttcaatattgtctcatcccttcctaaagtgagttatccatttgtaaactgctgatttcttcaggacgctgtccccatacacttctcataaagcatcagtgatttcaccattcttccacccaagctccaccataaactcaatgtttattcttgcttcaattatagcaggattcatgttgctgtgataggaactcttttcaaactgatgcgcctcaaaccagatcctgtccagccatgttacaacaagttagtgtgtgtttattttggtgcaaaaaaaaaattgaaatccatgcattgctttttcagaatacacattttctatgaacttcttaaagaccccctatggaccctgagagtcagttattcaagatgtggcttattagggtctctgatcaagttgcaaatagtctaaatttaatttaaaaagaaacaacaacttgggttatagttgaagggtccttttgacgggtccgtcgagcccccaagtattgcccattttgcttaaggtcaaagactgaatttataaccctaaattagcctctgaaaggagagtgaagtcaatttaagcccacaagatttttccagtgtgaattgtttgctcaatgctggttcaagtgcctaggggggatacaagaaaatggcaaagtgccacgtaaaaattttttttttttttttgagacagagtctcgctctgtgcccaagctagagtgcagtggcgagatctcggctcactgcaagctccacctcccgggttcacacgattctcctgcctcagcctcccgagtagctgggactgcaggcgcccgccaccacacctggctaattttttttttttttgtatttttagtagagatggggtttcaccgtgttagccaggatggtctcgatctcttgacctcatgacccacccgccttggcctcccaaagtgctgggattacaagcgtaagccaccgcgcccagcctaaaaaaaatttttttttattactttattttacattccagggtacatgtgcaggatgggcaggtttgttacataggtaaatgtgtgtggcatggtggtgtgctgcacctatcgacccatcacctaagtattaagcccagcatgcattagctattttcctgatgctcttcctccccttaacccctcccagtccccagagtgtgctgttcccctccctgtgtccatgtattctcattgttcagctcccacttgcaagtgagaacatgtgatgtttggttttctgttcctgcattagtttactgaggataatggcttccagctccatccatgtccctgcaaaggacataatctcattcctttttatggctgtatagtattccatggtgaatatttaccacattttctttatccagtctatcattaaatgggcatttgggtatttgctcttgtgaatagtgctgcagtgaacatgcatgtatctttataatagaattattcatattcctttgggtatatacccagtaatgggattgctgggtcaaacgttattatttctggttctaggtctttaaggaattgccacactctcttccacaatggttgaactaatttacattaccaccaacagtgtaaaagtgctcctatttctctgcagcctcaccagcatctgttgtttcttgactttttaaaaattgccattctgactggcatgagatggtatctcattgtggttttgatttgcatttctctaatgatcagtgatgttgagctttttttcatgtttcttgggcgcatgaatgtcttctttcgagaagtgtctgttcatatcctttgcccgctttttaatgggttgggttttttttcttaaaaatttgtttaagctccttgtagactctacatattagacctttgtcacatggatagtttgcaaaaattttctcccattctgtaggttgtctgttcactctgatgatactttattttgctgaaagcaccagttttcggaggattgacatatcaattaaaatgaaaatatttttaaaagagaataataagagatagaccataatcaaacttgaaattgcatgggggaatatctgagagccaaaggaagtaagaaaagagtgaattggggtgacatcaggatacgagagaataacggcagagcagaaatgcggcaaagtgagaggaagacagtaaagaatgatgaaagtcatcctctaggctgggtttcacttttctaaaaactttcctttgaataattcacacagcactcgacagagtgtcattttcgtttttagaccacttaataaatatcgattgtaatggcagaaaatgtaattaaaaattaaaatgctattattcttgagatactgagcctggcttccaaatattatttggtaaaatgttctcacagtcttggacacaacttcagcatgacagagtgaagccttcaatatcacttgaataaatgctgaacagaattgtaaagtagagtcactaaaagaacaaatttctctccatagtgcatttgcttcttttacatgtatactttcaagtaggtatcagaagccatcttttatattttaaaaggctctcctaggaaattttcagaagaatccaaatatcaacatatcctctaattttaattcttccccattagcagcttcttttgctgtgatggaagcaaagttttatgtatagctattttttgtttatgttctcaatttgactgtaaagtaaatttcagtaaattcgatattttttattacttctcttgatgaaattggaggagcatttatttgggaaaatgctatcaatatatagatttgcaaactttatgtgtagcatgacaagctaaggagctacaggctgttgcaagccaatgtcttttaaattagcattttatttatttatttatttatttatttgagacaaggtcgcactctgtcacccaggctggcatgcagtggcgccatcttggctcactgtaaccttgacattctgggctcaaacgatcctcacacctcagcctcccagctggctgggactacaggcatgcaccatcatgcctgactaattttttaaattttttgtagagatgggatttcgccatgttgcctaggttggtctcaaactcctgggctcaagtgacccgcccaccccagcctcccaaagtgctgggattacagatgtgagccaccaaatttttttttgtattaaaaatgatacatggtgattctagaaaaattgacaatgtggaagttttttaaaaagaaaacagaaatcacccacaatgaatatggataaccactggtagcattttagtttatttccttttagttcttcctattatatatgtaaatttttaataaaattgggatcctattgcaggtgcagctttgtttcctgctttttccactttttattatgtcctaatcattacctatattattaaatattatttagaagtgtgatttttcagtgtctgtataatattttctagtatggacttataattaatttaaatataactgtattattggatatttaggttgttcctaactatttactaaacagataaggcgtttcctttacataaatatctttgcagcacctctgaatatttctataacatacatgtctagaagtgggattatagaggcagacactgtggacattttaaagacttgttaaaccaaatttagcctaatgctgcttccttatatgttttaagttccacctaaaggttcttctgtacctcgtgaactataacctaagtggagttataaacaaactgtagcctactcttgtgtcaatcactgagttttggctaatgaaatgtggccaactgttcaaaacgtgttcaaatacagcaaatgccaatctgtaactaatctggctgtttctgtacctcacttctgccttctgaacatcattttcttttttctgttcataaatcttcttccaccacgtggctgtgcaggggtctctgagcctcctctagctcgggagactgcctgattcatgaattgttctttgctcaattaaactgttttacatttaattcagctaaagcttttcttttaacatactcttaacagttatggccaaattgaattctatacaagatgtcctaattgactttcctaccagcagttgataaggtgtctattttactgcacccttgccatcaacacatatgatttttaaaatatttttcaagccagagcctcgagatggatccaagaatcagagcttcagagattcagtgcccatatcagtgggtccaaatgaggttgtgaagggcacctgagagagcaaaacaggctgcagacacagaaagatttgaaatcattcccacaggtactataatatcccgcatgtccactgagttgtttcatgggccagcaggctgatgtgtgcctaggtgtgctgggctagcctaaaggtgcagagcagaggtaggcgcctgtaggaaaacagcctgctgcatagcaagagtgacgccatcttgaagcgaaagcaccataatgacccatgtttgactccagcacaccaaggcgttcctgcggctaggtcaagaaacaatacctgtagcatagataactcctcacgaagatgcttatctcacttccccagtggtcttaattttcgcaggaggatctgagacatgaccagctgcatgctttgccctaaaaacttgccatggaaagaatacttcttggagggccagggcagggatccactctctcagggccaccagagacatggcttctaccataagtccctattaagtgtttctttcgaaaaaagtggatttatcggcctccttctttggcctccttcttcagcctcccagctccctcagccttttggagtaggtttgcacagacctgctccctgcagaacagcaccacaggcgtctttctgacagctctgcctgatttctctttcctcttccttttctataggtcctgttggcacaacctactgacaaccctacaacaaccaagggcctagtctcccttctgttttaagcccatcaagcaagaacaaaagggatataaacacttcctgttccattggaagtaagcctggaatgaagtcccaattccatgccgaggaaccagtgagccccaaaataaagcgatgtctccatatcacatcttgaatcacctccatttccaaccagattcagaatccaatgctcagggataagggagagcgtccagtagtttccactggcctcccttccgtttctcccttattgtctgtccctccaccaggggtatggcctataccagcttgtgaagagctggtggctaaacgttcaggaattttcagaggcgattgttaaatatagttattaaacaattaaatgatgtaacccttccactacataaactatattaaaacaaaggtaataaatacccaaaactcaccactttgtgatcttactgcactttactgtcattgacatctgtcaaatctgtacgggggaaatacgtaatgctgtgctactgttcaactccaagttcagtgatgtcagggtggtagcttgaaatcgatggaagtgaaagtatttacactgtagaaattggccaatgatataaaatgggccttgatttactgttttgttgattgtgtagacttaagaaaatgataaaatgtcaagaatgtggattaaaattaaaagtgtagcacaaatgcagctgttccattctgaatagcattaaaaatttgaggaaataatattccagtattgaaaactattatctaattcgggaaagcggttgctcctgtcatgatgaattagtgacattccaacattcatcttcattgtttcactttcatcttacatgttaaagtacatgaaaacatcaaccaacattcatatcttaaccacactcatccgtcaatgatatgagcaacttctttaccgaattggaaagttattaagcatttattcatagtctgattttatgacactgttgtcgatgacagaattattataactgatagtggattttgaggaagttgcaagtcagagtaatatagacgtataaattgaaaactaaggtaaatatgttagcttgaaaattttttctataattacataaagaaattaacaaaattttacattaatgctcactcagtcttgtgacttttactgatgtaacatacaattattttttagattcagatccctaaaatgccaaaatgatagagtgatcttgtggtaaagctgaaagagatttcagtttaatgaatataatgtatatgagagtgcgaaagtctaatggtagatcacatattcaatttaatgaaagcaatttattggggaaataggtatcagattgggatacaactccacttactcccttttcaaatgatcattgacacaaccataggttgactatggatataagaatttgacaaaaagagcaaaactttctgtgaggatcaaatggctatatggaatttataataaagagcattgtatatgttactattacttgtaaactgtctgatacacactcttttttaaaatttttttttatttttttgagacagagtctcactctgtcacccaggctggagtgcaatggcgtgatctcagctcattgcagcattctcctcctgggttcaagtggttctcatgcctcagcctcctgaatagctgggattacaggcatgagccaccaagctcggctaagtttttgtatttttagtaaagatggggttttgctatgttggccaggctggtctcgaactcctgtcctcaagtgatccacgtgcctcgacctcccaaagtgctgggattacaggcgtgagccactgcacctggcctacacatcctttatatcagaaaaatgtataacaaacacatatacttttttccagagagctggctgttaaacatttaccggcaccccacagctccccatccaccttcaccttacgttgactgccctatcagtttgaatttctgtctaggttccctctcctcagttctgatcacatttcatattccaggccattgcctttacagcaacacttcaatgtcaatgcgattgcacttggcaaaagatcatgtgcatgtcttggctctgcacagcatccttccccgggcttgactaggctgcagtgacccccaggtctctggctgagttcctatcactacagagagctcttccaagactcagccattgcttccaagtgttgggctctagaatttttgactaaattttaaaatagttgtacaaatgtcatatcatattttttccccagaaggagctgccaactgtatattctctagccttgggaaatcttacgtttgatgctttaaatttttgagaatgctgagttctgaacagtgcatgatgaatttgccttatatgagtgtttttgagattgagcagagtctgcttagcccacatatgcaaatacatgctggtgtgaagtggtaatttataagaccgtttttttgttccactgggccaatatggctttgtcaaattattccaactgtgaagtctcatgggtcatggtaagaaataatttctctactgaccacagttgagaaatcctaaagaaatgaggaagatgggcaggaataatcagagttatctcaatagcctcctcctctgcattaaatttagcaaagatcattgctttagacaacccaaccctctttatttgattctttttacacggattgatttccaagatcatacatcctcatgctcagccccagaaaactgattgcattggtgtttttagaattaatttatgggcctctaggggccttcaacactgtctcctttgctcaggtaacacaggaactggctgagattttgcagcagacagatgttgtctggaacgtaaaacaaaatgcctatgctaccaaacaaacgcaaggtttgaacaaacagaacatacattatttttaccatatgcatagcaagggggaacgaggtagcttcgtctagctttgggaccagaagcattttattttttatttttattttcatttttatttttttgagacagagtcttactctgtcgtctaggctggagtgcagtggtgcgatctcggctcactgcaacctcccctcctgggttcaagcaattctccctgcctcagcctcctgagtagctgggattataggcatgcgccaccatgcctggataatttttgtatttttagtagagacgggctttcgccatgttggccaggctgatctcgaactcctgaccttaggtgatccacctgcctcagcctcccaaagtgttgggataacagatgtgaaccactgtgcccagccagcattttatttttgtttgaaattactatattagctcagaatcatttactttttaagaatagtgtatatgaatcaccttagagatcaatttggagcataattgaacattttgaatacatttatgccccttagagatacttggtagatacaaatttaacttcctttttccctcaatctaaaacttcatagagaacctgaagaccagaaggagggtaaagtgttgctaatttttatcttgtcttagtaattgaattaagatgaacaaatctcaaaatgcaccacaagctgtaagataaatacctaggagaatagagtttcaaaaagagaattcttgcaacagcgtcgttaagaaaattagcctgattgtaaatattacctattgaatccgtccttatgtaactttgttaatcacacaaacagccacacatccatattcagaagctaaaaagagaaaacagcatatggctgacaaaaggcgtgtacccagtgcaagatttttcaaagagcacgttcccagcaaacacaatgtcctgctagcagttccaaaaggcttaaagtaaggcatcctggggtccagggccagggagctgcagggatgggccctccacctgccttggctgtccagggtgggaggccactggcctctttccaacttgccctgaattcttgcatcttccctggttgctcagctccactcagcgtagaggtggctaaccccaggacctgctgacacttgtcaaatacgtcactacctattattcattctcataagggagaaatttccagcacttattgcagggataggaagttaacaaactggcaggtgaatgaacctgctgattacgtgctaaaaatcagtattttttgttcctcttctcgcatttctcatcttatactgacatgatacaagggtatgtcagggaatgggttttccgccacttctctgccagttacaaactgtgattcagaacctgtcccctacacatatgagagcttagtttcctcttttgtgaaatgaagaggcaggattaaaggatccctggggaccatcacagctctaacaactcaggaactggggctgcacttcacaccttagaggagaattcctttagggggattaaaagcagcccagacatgtggtctctacagtaagaacaatgaaaatgcttatttcagaacccaaacccccctcctgatgaattgtcactctcctgtcaggccagcacacagcattttcatagggctccttcctccttagagcaccttcactccctcatccaattacctttgcttcatatctaagttcaattaaaataattaaagcagctagcagatagttgatggggaggaaagacatggacaatttcctggaagaattctttaaggggcaatataaaagaccaaggactgtgaaaagtagaatttttcttactggaattcccccgtctgggagcccatgcacttcccagatgtttcccatgatttttatgggtgccacaaggaaattaaccaagcaagaatgcccagttacttctctatgcaaacgaagagcagctcatgcaaaaatagccataccccactgttccagttatctatggctgcctagaaagctaacccaaaatatactggcttccaacagcaaccttttattttatttcccaattacgtgtatcaagaattcagtctgagtgtggctgggcgatttgtccattctacacgtcagccacagaggtcatttagtaactgctggatgaactggtctggagaccccaagatagctcatcctgtgtgtctgctgccttgccagggatggctgaaaggctgagctcacctggagcacccgggctctggtggcttaactctaatagtcaaatcctatttgaattttctctttgctacttaccccaacctctccctccttctcctcatttttctttttgtatttataatgaatattatgatgtctatcctagtctgcttgggctgtataacaaaagtagtataccatgggggatgtaagagcaaacatctatttctcacagtactggtggttgagaagtccaagatcaaggtgccagcagattcggtgtttaatttgagcttacctccagatttgcatcctcacatatttcagagaaaggtcatctctctagtctcttctttataagggcactaatgtcatcagaagactctgctcttatgcccaaaggccccagctcctaataccatcacactggggattaggctccaacatgtgaatgaggggcagatggtacaaacattcaggccacagcaggtgttctttttatcacaaagtactacatgcttactgtagagaattaaaaataaagaaaatacaaggaagaaaatgactcatactgccacaatctagaaataaccacaagtaacgtctttccattctttcttctgtgtcatgtacttagatttcaagtttagatgatatttagttcatgtcttgcttttaaaataaacaatcaatgactattttcttaagtgatcaaatatcccttgcaaacactgtcattactattattattattattttgagataggatcttgctgtgccacccaggctggagtgcagtggcaccagcatggctcaccacagccttgaactcctggactcaagtgttttctccacctcagcctcctgagtagctggaactttataggtgcatgtcaccatgcccaattagttatttaaatttttactagagacaaggtcttgctacattgctggtgctgaactcctggactggtgctgaactcctggactcaagcgatcctcctgcctcaacctcccaaaatgctgggattacaggcatgagccatcatgcccagctgcaaatgttattttttaatgctcacatactacttcattacatggaatgccataatttatttatcaatttcctaattgtagtacacttagattgttttcaagttctggcttgggtaagtaatactctgaacacttacacatcaacttttgttcgcattttaaattatttctttaagggagattctgacaagtagaattcctggatgaatcctctcaccttgaaagtcttccttcctttgacttgtgagtcacttttcctccaggatcccattatctcagataaatgcttcctaacataagccttcatgttttcttctgcatatggctggttgttaaagccatggaacctggtaagatgtgccaagagggtttaaaactctaaaaaaggcaagaaaaagatggttttcaaatggcaaaaatgtgtttataataaacccaaagaagtaaatacaaaagttagtaaagactaaaagttcaataaaatgtctggttatgagagctatctccaaatttcagttccataccaaaaaaaagaaaatataattaaaatatgatgatgtttttaaaagcaggcaaaaatataaaatgcttgggaactgacctaatgcaactggagcaaagtaccatgttccttaaaggagagagaaatacagtaaacatgataattctctccagttacatgtcagagttttaacactattccagttaaaattctaatcgcttactttatcgaacttaatataataaatctaaaattcattcagaaaaataaggagaatattgatgcaaagaacagtgagatacaactagctttacctgaaattgattttattataatactgaagttggcaaaatgatatgattggtgaacattttgtaagtaatggaagtacttgcaaagaaaagctctcgggggtcatttttaacaaactcagatctggagagagcctattctatttgtccctcttaaataagaaaacatgttatttcatgatctggaaagttctggatattgtcatacctctgggtcctggggaggcatagctactcactttcaggcaagtggggtatatacaaaatggataaaaaccttcctgtggaccttccctctggtggtgggaaatcctgtttaactcaggtagcagcatctaaagcagtgttggtgactagctcagtgttcgaggctttgagttccaagacaaagtggccgctatcccccaggaaaaggtggagattagcaaagaggttgtagaacatttcttaggagctcaggaaggtagaaaacagggatctgtctgtggataacaaggtgggcctcagaggaaagtcatgcaactggagttcaagtttacaatgtttctacattatgcctcttaagagatttcaggggtaaccatgaacctcaaggacagctctggtggtagagctatggctggaagaggagctggccatcactaaccaagaccgtcaaagaagccacaggcctaccggttgtcttcctggagaatttgagggcaggtgagtgccaggtttttgggaaccaggttggatcacacctaggttgatcccagcaataacctgtgcctaccagagggcagaacatcactctttacctattttctttactgtttcaaaagggagagaaaaggggagaaaacacactctatacccttccccatcacaacagacatctttaaaaaaggaacagcttcacctgtaagcatagcacatattttaggagacctacatttcttcacgtgtcagatgcattcttaacactgtgtgtgcaaacacatttttataagagggcattttcttttaaatacacacagaagagctgactatataagggaacgctatggtgaaaccatttgtaaagcaaataatcacttcctgaataaatctgtctctaagtctggattttcatattttatatcagatttgactaaaggaagtgctctctacaaatgtatcctctgtccaaattagaatttatctgtatccatgcaaccttcagaatataatttccataataagtcaccaaatgcacatgacagtccaactccatcaataactttacctcttttttgccttttattcatactttagaatatacaggtatctgtcttggttagtccaggctgctataacaaagtaccacagtctgggtggcttataaacaacagaaaattatttcttacagtgccagaggctaggaagtccaaaaccaggtgccagcatggttggtttcttgtgacagccacttttcaagttacagactgccaatttcttgttggatcctcacgtggcaagaaagagagttaacagagctctcgggggtcattttcataagggcactaatcccattcatgagggttttaccctcatgtcctaatcacctcccaaaggccccacctcctaataccatcaccttggcagtcaggacttcaacatatgagttataggaatgcaagcattcggtctatagtaatatcttattatacagagagttatgttttgcttctttgtaaaaccttaggacttcatccacaaaagaaggatgcaaatggccattaatatgtgaaaagaagctcagtctcactagtaatcagaaaatgcaaattagccaaaaccatgtacgagttttactcatcatactagcaagatattcataatatcaaatattgaacaagctatgcagaaaatgtataaattgtaacagacttttttgaaggacagtttgacagtattggtaaatgttttaaatacacataccttctgacccagcaatttcacttctatgaattttccctacaaacatgcttgtgcaggtgcacaaagatgcaagtataagcttgctcattctggcacagtttgcaaaaacaaaaaagctgggcaacaaatatgtctcatagtagaaaactggttaaggaaataatgtccaggctgggcacggtggctcatgcttgcaatcccagcactttggtaggccgaggtgggcgtatcacttgaggccagaagtttgagaccagcctgcccaacatgacaaaaccctatctctactaaaaacacaaaaattagctgggcatggtggcacatgcctgtagtcccagctacttgagaggctgaggcacaagaatcacttgaacccgggaggcagaggttgcagtgagccaagattatgccactgcactgcagcctgggtgacagagtgagcctctgtctcaaataataataataataaattatatccatgctacagaatactatccaaaagttataaagaacatgataaaggcaaatgtactgatatgccaagattttcaggacacagttttttttaaaaagcaggttgcaaagcaatgtttacagtctatctggtttatcaaaaaaaatgaaaaatcaaaacactaaaattatataagaaatacaggcggggcgcagtggctcacgcctgtaatcctagcactttgagaggctgaggccagtggatcacttgaagtcaggagttcgagaccagcctggccaacatggcaaaaccccatctctactaaaaatacaaaaattaaccaggtgtggtggcatgtgcctgtaatcccagcaactcaggaggctgaggcatgagaatcacttgaacctgggaggtgaaggttgcagtgagctgagatcatgccactgcattctaacctgggcaacagagtgagactccatctcaaaaaaaaaaaaattaaaaaaaaaaagaaatacaggtgatagacagatagatttagttaaatgtaaacacatattaagaggctgataggaatatgtcttaaaatgctaagtggttaatctttgaagactgagtggaatgaaagaagtagaactatactttttaattccatcttttatattgcttgatttctcataaagggcctatatttatgtcacagtatataattgcataaattttaatttatacaaaatttaggacatttgttatataatatgtaaaaggggaaaaatcactactaaaatacatgcttagtgatatacatactaggtggaaaatactagaaaccctctccttgcacctgattctttctcattattgtaggaaagctaatcttcagttctgggaaccttgcaggaattctgtgcactaaagttcccagggaaagagaatgctctttttcatctttactgttccactaccttaagaaaaatgagccccagaggattgtactcttgcatacctggggaggcttcctgccaactgagcagggtttccaggtaagaaagggcattggctggatgtaggagagggcagagagcttgtctctactagaaccctcaaatggtgttggggaaactgttcagtaggctggacatgggttaaagagagaatcattggcttttttacttcttcatccccctttccaatttccttcctactttgcagtccatcgatttccaacttctccctgttctttcccatgcccagttttctcacaaactcaaagtgaaagccttgcccagccaagccttgtgctcgaggacctaccttccccaccctcccctccatcatttttcttccctcatttactactagtgtaaagggatttcctataagggtgctctagctaatctaacaagccaattcatgcttagatgtactgatttgagcagagacagcctcccatacctccacctccatatttacttaagaatcacctttggctgcccatcaacggtagattgaataaagaaaatgtggtacatatacaacatggaatactatgcagccataaaaagaacaaaatcatgttctttgcagcaacatgaatacagctgaaggacattatcctaagagaattaatgtagaagaagaaaacctggctggacatggtggctcaagcctgtaatcccagcactgtgggaggccaaggcaggcagatcacttgaggtcaggagttcgagactagcctggccgacttggtgaaaccccttctctactaaaaatacaaaaattagccagttgtggtggcacacatctgtaatcccagctactagggaggctgaggaaggagaatcgcttgaacccgggaggtggaggttgcagtgagccaagattgcgcaactgcactccacttgggtgacagagtgaggctctatctcaaaaacaaacaaacaaaaaagaaacaggaaaccaaatattgcatgttctcacttataagtgggaggtaaacattgggtacacatgggcataaatatgggaacgatagaccctggggactaccagagggaggaaagaaaggcgggtgggggaaaaggttgaaaaactattagatactatgctccctacctgggcaatgggatcaaccgtaccctaaacttcagcatcatgcaatatacccatgtaacaaacctgcacatgcaccctcgaatctaaaataaattgaaattattaaaaaaaaaaaagacagccttggcattaaggtattagaaacatggagagtgagaatctaaagcaatagacctgccccacatgctggaattggggtgttctctgggatgacctggctatccctgagatcctatcagagaaggagagaatctgctccacctttcaagtcatgtgatagcagaaagaccactttccaaggaccaaactcacaaccaagttcctacatttcaaggtcaagtcttttttcttggggcatatcagtctcatcacttcttcaatgaagaggattaggccagataatcacttctagctctgatgtcccatcattttattatttttttttaatctgttttcttcctgacagcataggaaggatcatttagccattagaccatttagcataggaaagaccatttgctgtgggagggagtatagtgtaatggttaactacctaggttcaaatcccatgccttcccttactagctatgtgtcttgggcaggttctttgacctctctgaatttcagctgccccatctatataatgcagctgagaaagtcatccacttcctgaaactgtggagagctgaaagacagaaggaacgtatcgcagcatctagaaccaaagaaaatctctgtgctcttggatacagcagtaaggatacacatctcagggttgaatcactttaaatagttatacttagataatatttcaccacttataaaagtaggcacacaagcccaagttcattagattccttaaataacactttgaggatgtgggcaggcatgagcatctccatgacatgagtaagataaccaaagcctagggtgttagctagggtcaaatactgggaggttgtgaagccagaacacagaaatgtcattcattgttcatttattcaaaacatgtgagggcccgctttctgttggacactgtgctacgtataggagtagaaagatgagtaaggccaggttagaggaggaggtaacagtttcccatggcagagctacaagggtaagcctgttacagtgcaagagctagactttggagtcacctgtcccctacctgaatcctggatccagcacttagtagggtattactggggcaagttactaacagctcactgcctcagtttccccatctttaaggtgcagacatgatgtttacttgaggctcagcaatgcaggagtgttgtgagacaatttttcttgctgacatgcaaaagtacttcccaacaatatcatcgtgatgaattcaccatcgtccaggttagagtcttcagcatggaaatcttcaatccctggttttctcggtagcgtgaggtccagttcttaggggagtccttataattagccaatcctatggagactgatggtgaacttccttggtaactcataattcatgatgacaaataaaatgacttatgtctaaaaatactcaagtcatgatgaagagtgcatggtccgtgacaggcaaaccaaaactaaaaacaaatgagctacgggaactgagtgcttaatggcatcagatctttttactaaatatgtttatttccacaacagagaagttgcttcccagtggcacacccagatgcttcatggaagggcacacctctggggtggtgctgggttcagactggcatggtatccacacttctcctgatgctagctttctctaggccctctgttagctcgtcccgcttctgatggacacatttttttttccctttgctatgtcaacaccatcactatgatctcatccatcaggtatattactaagcaagaaaagaggctctgtcttctaaacaattcaaataagacctggtacctcttccacacaacagttccttaggtgtttctgcaaactctaagagtgccttcagatgacaccctttccccatcacccccctaggaggcagaaacaccaaacagaagctaccaaagtggccagacatggtccaaagctttcacagctgggagttctgagagttggagcagagactttgcagccaggggagatgatatattaacatatatctgagtattgatatatttgaatttttcaaatcccagaacgtaaagggtccactatgaatttgcgttccctcttccatgtataaaaccagatctgcccaagataatatttattttcacacatcatttggaagtatctgtttcatttcattatctatgttgaatgaaaaggttatgtcatttggacttgagcctgagcagagagtgccctgtcattataaggctgtaaaaacaacctcctcttcctcctctccacgctgtgttccctggacatctacctgttccaggtttaagttctgggctaggtcagtgacgtctgagaagagagacttcagggtgcctcttgccctcttgttaagcagagcatggtataaatacctcagcagcattctggactaaagctctgtcaaaacaactgctactgagtcgtttaatttgtggaaaggaaatcttatttggaaaaataaagttcttagttccttgcaacattcttacactgcggtagggctcagaatgctggagaaagcacttcgagacctgaaacccagccctgttattagtaattcatttgctttaggacatgtgggagaaaatgcattccttggcttttgggtccaggtaggcagctctgccagcaacaacttggaaacactttggagctgagtgctttgtgggctgcggcagcgtggtaaggaggctgccctcctgccgaagctgcgagggcagttggaaaggcgcttattttgtctggtaaaagcaaatttccaggcttagctaagcatgttgtgcaacctagccccactgaatgcctatgggaatgctctaagatgcccagtgagcatttctttatgcaacagtgcattttcattttcaacgtaagactcttttgagcccagttcttgtatctaaaggtcttatggtgtcagggccacgagattgtgtggggcctatgggtcacaggttaaaatctagagtgggttcctgtgcattctcagtatattctatgccagactatggaaatgaaccctctacaacaggagacaccattactcagtaaatgcacatgtaaaataatcagataatccgtgagtcatcaatatttattcaattgttagtggtaatagagaagaacaataccataactcacctattttggacacttaggtatccaacaaacacttttcattagtcgattattatacaaatcagtggctgataatagaaattcactcatcatttatctttaggctaggattgcatgatgtgatagcctcccacagttcacgtgccttcttttttttgagacaaagtttcactctgttgcccaggctggagtgcaatggcacaatcttggctcactgcaacctctgcctcctgggttctcctgcctcagcctcccgagtagctgggattacaggcaagtgccaccatgcctggctaattttttgtatttttagtgcagatgggatttcaccatgttggccaggctggtctcaaactcctgacctcaagtgatccacctgcttcagcctcccaaaatgttgggattacaggcatgagccaccgtgccctgctggtatgctcttttaaaaaaaaaatttttatttttaatttttgcaggtacatggtaggtgtatatatttatggggtgcatagatgttttgatacaggcatgcaatgcataataacctcatcatggaagatggggcatacatcccctcaagcatttatcctttgtgttgtccaggctggagtgcagtggcgtgatcttggctcactgcaacctccgcctcccaggttcaggcgattctcctgcctcagcctcctgagtagctgggattacaggcgtgtgccaccaggcctggctaactttttgtatttctagtagagacagggtttcaccgtgttagccaggatagtctctatctcctgacttcatgatctgcctgccttggcctcccgaagtgctgggattacaggcatgagccactgcacccggctggtgtgcccttttaaaaaatattttgctcaggctgttgctgaatgagcttgcatttctcaggatggtacacacaaattaatagcatagaaaagtggccaggaagtgtgctgcatctgaagaggaatcgagtttgagagtaacccttctacagcacgtgttgtacaaagtcctcatggctccacccgcgggatgctcagagagcccttctctgcacaacatttcttacactgccttcctgccaataccccagggcacaagcacctggttttttcacccattcagcttgcattattgtagcactttgattccaaaacacaaaaaaagtctttcatatatttctttttattgattcccccaacaagcaagtaaaagatgtgaagtcacatatcactttccatcaagagacagtggtcactgattagtggatcagtccaaggccagtgctgttcacgtgtctatccgtgctccccttgaagggcaggattgaaatcatgctcctctagtttttagacatctagccagaggagggaagagtgcccagaaccttaacattcaactcagaattcaccaggaccatgggaagcccaagcccttccaggaagattccctgagccctttgacctccctgatgtctccctttcgtggtctcctactgcacttagtgctctgcaccccttctcagatggtgacttcagtctcatcctgtcctgtaacgttttcatgagtgtttgtcttcattcagccatgggatacaatgttatattgggtggtcagccctttttgaagggttaacattggactgaaccttcagtgattaatatcaccaattgggatccttaggaaacagactctggaatgaagattagcacacaggaggttctcagggagtgcttgtgggatcagcgcccatggaatggagaggaaggaagtggcattgggcagagggagaagctgagctatgaaggcctcagccgaccccgcagggggctctggagctgagatagctttttagagttgccctgagttggggcaaggggacaggcacctgctcatgagataatcagtcattggatggtggctcctccaaaaaggaagcatgaccttgggaggggcatctctctttggcagaggcaatgccagaaggcggctcacagctgagggctatctgccggcaacactttgagcacctaggggaacaagttcttcatttctgcagaggaatctcagcactgtgatatagcaaccatagcaacgaaacacaaacatagaaaggaaaagtattccaggtagaggaaacagcaaatacaaaagccctatgttgggacaaaaggaactttctatccaccctctgaaggtttgctctctgaaatagacttgattttagacagacgaacaggagaaaaggcatacaaatttattaacatgcaagtgcacataagccacacaacgtgtgaaactcaaagaatggccagatggttgaagtttaaatatcttcttcataggggagagggaagggaggatataggcaattttagaggaagagcaaatgatttttaggggagatgaatgggcttgaataataggcaatagcgtgggctctggctatggagtctactctagtccttcttcctgcaaagatatccggttgatgagatatctggggaaggaattcccaataattggatatcttctggaggatctggcatttaggtagataggggaactttagggagaccctcctctccccaccatatttgctgcttcccagatgcactcaatttgaagtccaaagtggcatatttgacacattttggggtatctatttttttctttttttttttcatttaggaagagggtcttgctctgttgcccaggctggagtgcagtggccccataacaactcactgcagcttcaaattcccaggctcaagcaatcctcccatctcagcctcccaaagtgctgggattacaggcatgagccactgcacctggcctggggtatcattttctaaaccccaacagtacaacaagagttagcttggcatgtgcaagcaatgggaagaaaaaatacaaatccatcactaggaatgtcacaaaagacagggagcgaagagaaggcaggagctgattgtccatgagttcagtatttattctagtagcagtggggagttttttgagggttttaagcagaagagtaacaggatttatttatactttcaaagattgccctggctgctgtatgtgggccataggggtgagtgtacagcggggagacagcagggcacagttgtagcagtcagggtatgaggctacagtaacttggatgagggttatggcggtgaagctgatgaggagtggctgaattcaggatttatcttaggggatagagccaataggacttgctgataggtcgaatgtaggatatgagagggaaagagaactaaagatgactcctaggtttgtagcctgcccaactggggagctggctggagcattagctaagatggggaaaactgggaaagaaagagttagggtgtgggtatgtgtggaacggaaggaagatagaggggcaaagaagggctcaggattgttttgaatatggtaagtctgagattcctgtcttagtttttgttcccagagaaaaattctgagataagagtttgaatgcaagtttatttcgatagtttattgcatttattgttatgcaaacaatattgcaataaacttggatccttggaggcgagccaaggaaacacagattgggtgatgtggaagtaagacagggaagagagggcaggcaacaaggggtgagtttatttaaaaagacaccagtgtatataccagtggagcttaatactgctggagaactctgggaaacagtacagagcatgtgcctaacagtggttccctgggaaaggtaaggaggctggggtaattatcaaccactcccgtcagtgctctgggattaattgattccttggggtgattgattccttggcacttgtgccatgtaggctggagcacagcaggctctgacagccagaggacatcccaggcaaagaggcaggggctggcaactggaagccaggctggtgggcactgagatggcaagggctgaagggatactggtgggcaagaagagtttcatagtcaaggcctgattaggacaccagataacacaaggagaggggctggtattcggggaggtcaagtgcaagggccagtatcacagttcagtctggagtcacaaagagaagacaagcagtaggtgaggcagcagttagatcagaatgacgcccatggacagagcttatgggcactggcacatcttttgaagaccctgagtcaatattaagagtggacatctccagttctagaatctcagtggattgattgagattgggtgcatcatccaaggatgtcagagttgcttctgcggggaacttgcctaaagactgattaggtgacttttcaaggctgcctacaaacctgagcttctatgagttcctcttttacaaatgcagaaatcgtggtgcaagaaagataagaaaaacccttagactctaaaagtgtgctgatgcccctagctaaagaacactgcacacatgaaagctcatcgcagtgactttttccacaaaggaggtgtgaatattttatcaatattcatgaaaaataattttgtaaggtaagcatgtcaaaatatgtcaaacccgaaggtcacattttccagaattctttttgtcccatattatgtttcaatgcagcatcatctttctgtccagcataagtgccccaggcaatggtaatcatttcattacttaattgaagtcctaattatattaggatctattgtcaaatgtggtcctgtcttcattacaacacttcattacaacaaccataagtaaatggaagtgttggacttttcctgtaagaatagttgaatttaacttctcaatcttgctctctttctttctttctctctttctttcttttttttgagatacagtcttgctctgtcgcctaggctgggatgcagtggcgttatctcagctcactgcaacctctgcctcctggattaaagtgattctcctgcctcagccttctgagtagctgggactacaggcatgtgccaccacacctggctaatttttgtgtttttagtagagacggggcttttccatgttggccaggctgatcttgaactcctgaggtcaggcgatctgcccacattggcctcccaaagcgttgggattacaggtgtgagccaccgtgctcggccaaacttctcaatgtttcatttcccaccccagctcatcctacctttctgagctggtaaccaaattcaaggcatgaagtttttttaaccaaaaagagcaaaacctttgtaatttaaatataatcagcctcccatttgggagatactctgcaaacatcttcatgacactctgggacagctgctattgtcctcttggctgcaatccctacattaaaaattcatgtttgtgtcctttctcggttgtttggcttagctttactcttaaaaagtgtttatgggccaggcacggtggctcatgcctataatcccagcagcttgggaggccaaggcaggaggaccacttgagcccaggagtttgagaccagcctgggcaatatagtgagaccctatatctacaaaaaaaattaaaaataattagctaggcatggtggtgtatgcatgtaatctaactacttgggaggctgaggcaggagactcacttgagctcaggaggtgaggctacagtgaactatgatcatgccactgcactccagcctgggcaacagagaaagaccctgtctttgaaagaaaaaaaaaagtgtttatgatcctccccaaatagactccatccttttatttctcactgaactcccagacagaggttcttaacctgaagctcatgagtcctgtgaatttataaaacagctccaaagacgccacagatacctcgaaattatagaaaatttgatctagctttgcatttgagcctctccagggtaaaaatctttctacagcttctaaaaggaataggtaacctaaaaccaggcaaaacaaaacaaacaaacaaaaaacaccccaaaactttgctgttttaaaatccccattttaaaaaaagattatgtaaaaataatttttcttttttcattttgttttcatctttaaaccagctctccagagcctcagccaggctgcctcatcatcgaatcattctgaaatatcttccacaaaccttccccttgtattcataccaaatagctctcagctatactccaaacccatgcaatgaggtagaaaattacttccctccccctccgattcttaaagtggttaatttttttttcctggaatggacattattaatatttcaaatttgttctcattgctttataaactgtaaccatggatccagctctaataaagatgtcccagtgagttaatcatgctagggaacagaaaaactcagggacattcagaatcacagccagaagggggcaatccttctcacatcatacctaagactgcagctcctgtcaggctgcgtgttcatgtgtaaggcaccacaggccccgtggtgccagctcaccagctcatcttggtgccagctcaccaggtcacgtgctgactttaccagtacatgtatgctaattagttatcatccaattgtttgccttcctaaaggaatgagggcatcatctcctagaatttgtcttctaagctcttctcttgaccccggaaagaaatagtggacttcattgttttagggtgtttcatttttggaacacgaattgcagatgggttcgtggttggccgagaggagccaggccgagaagtttggctattttgtcaaaggcaatgagaagccactgaaggttttaagcagaaaagaattacagatttgcatttgagaagtatcagtttggagaataaattagggaggcgtaagatttggaggcacagaagccaggtggaaggctgtttttcaggctagaaaagtggtagtctgttgtaggttatatgcaatagatttggagagaatgggttagatgcagggatgtttatgaaatgggaattgactggcttactctggaggggatgggaagggaggcagaaaggagtcacagatgacatctttatttgtagattgggttggagtagatggtggtgtcaattaatgagataggaaacctagagaaggagtagtttatttatgggggaaaaaagatatgaggaattgaacttgggacatgctgatctggaggtgcctacaaaccattcaagaaaaagtgtcctacagacaattggagatgcaaagcttggagctaggggagaggtctgggctagaaacacaggcccattccctccatggagatggtaactgacaccatgagagtgaagattacccaggggtagggatgatgaagacagaacagggtccgggagggaacgctgaggaagaccaatatgaagacatggatgaacaaagaggggactagaaagaagtcagcagggggactggaaagaagtcagtagaaagatgtgttatcacacaggtgagccttgaggacattacactaagtgaaaagccagtcacaaaaggacaaatactgtataagtccactcataggagacatctagaatagtcaaactcacagaaagtagacaccagttgcggtggctcatgcctgtaatcccagcactttgggagatcaaggttgagaatcacttgaggccaagagttcaagaccagcctaggcaacatagtgagacccccatctctgccaaaaaaaaaaaactaaaaaccttagccaggtgtagtagtgcatgcctgtagtctcagctactcaggaagctgaggcagaaggattgcttgaggcaggaggattgttcgaggttgcagtgagctgtgatcacaccactgcacttcagcatgagcaacagagggagacccagtcttggaaaaaagaaacagaaagtagaatggtggctgccagaggcagggggcagcagggaatggggaattgtggtttaacaggtattgagtttcaattttgcaagataaaaagagttctggagacacatggtggtgatgggttatggccacacagcagtggggatgtacggaatgccactggtctgtgcacttaaagatggttatgataataagttttatgttttgtgtattttacaaccttttaaaaataaaaagtgtgtgctattgtgggagccaagataacagagcatttggggggatgcagtgtagtcaggaagcatgccaaaagccaagtatgattagaactaaaacatgtttatttattaatactttaccaacgtggtgaccactaatgttctttttaaaagtagttttctaggcatggggggcacagaagtcaggtttctatggattaaagactagagggtttccagtcaagttggccttggaagttcaggtcctcctctttgctgcaatataacaaaacataaaaacatataaaaacacatgaaaatataaaaacaaaacaaaaatataaaaataggccagtataaatagcacatacacacttgctgcaataaagccaagctacaaagggtttcctgactgctcttaaatattctcaacagcattatggggcagtatttccttgtcctcaatacaagacctgggcctgtggtgaagtcaactgtgaaaggggagtgaggggaaatgagagagggagagggagagggagagagagagagagagagagagagagagggagaaataagccaaaattctaaaacatacaaaaacaattaagaaaggcatccaacaaaatcaacagtcaaaagataaattcattctacatgattgcagtaataaaatattaaactatttaatatatatatatatttaagatctacagagtaataaatgaagaacttacatacctaatagaaattttatcaggcaataaagggaataatgaagagaattgtgaaaagaaataacaagaaatatttgaggagaagatggctgagaatgttccatcaccacaaatatgtccttagatcaaaagtattctccccatgccagaaggttaaataaaaataaaaccacacctagaaataacataatgaaacagctgaataaaaattccagagagaaaatcttagaagctaccagagagaaatagcagtcagattagctaaaagggaataggaattaaacagccccatatatttctcatcagcaataacagaagctagaagaccatgaggtggtatcttcacagtgttgagggtaatataaatgatttttcaagttattattcaagaaggaagacaaaactaagacagcaggaatgcaccagccaccaatattccctattaaaggagacacgtcagcagagaataatgtgaacccaaaacaacagtgtgggacacaacacacaattgtgtagacagacatcaataaaatagttcagaaaatcattgttttaaaaattatctttcaggttttaaaaaggtggaattaaaactctagaaacaattacaaatatgtatgagaaggttcacagcagttttattcatagtggctaaaacccagaaacaagacaggtgtaatattaataggtgaatggaaaaataacttgtgatatattcatacaataaaatattacttagcaaaaagtacacaaaaagactgataggtgaattaatatgaacaaattttgcagaaatgctgaatgaaaaagccagacccaaaagtgcacatcaatactccattatttcatttatacaaagttcaagaacagacaaaatgaattcatggtgtcaacacaggggttatacttagaagggaaatatttgttgggatggattacaggaagtctgtggagtaatgtaaatgttgtatatcctggattacaggaaatctgtggaataatgtaaatgttgtatatccttttatttttattttatttttttctttttgggagacagggtctcatttaggatggagagcagtggcacgatcacagcttactgcaacctcgatctcctgagttcaagcgactctctggcttcagcctcccaagtagttgggactacaggcatgcaccacatcatctggctaattattattatttttaaattttttgtagagacagggtcttgctatgttgcccaggctggcttcaaactcttggactcaagtgatcctcccactttggccttccaacttgctgggattacaggcgtgcccagcctataccttgatttttacaattcattgagctatatgctgaatatttatgcgctttattttatgtaaattgtagctgactttttaaaaaacctgccagcattataaaaattgtgggagaaataatgggtacagtcagtaaaagttgtacaattgatcattttaaactcatgatccctaataaccaaatagtgggaagtaattataatgaaagagatgatgtaaggagcagaagaaaatgcaaacaaacaaataaaacaaacctttcactttcattcatatcttcagaagataagaaaggatgttgtgtatatgaagcaaggtcagggacgctaaacataaggaacattttgaaaacaacaaaaaaagaattgttagaaattaaaaatataattttaaaaacttcaagcaaagtattggagaataaaataaaagtcatttcctggaaatcagaaaaaaaaggacaaagacaaaaatagggaaaaatgtaacaaaattagaggatccatttaagagatctaacatctgaattaggcattcttaacctggggtccccagactcctaaaaggtctgtggaatgagttcgttcataaacccatatggtaaaataatacatctttattttccctaacctctaacaaatatacaacatttcctcttttaaatgtccaggcagccatgtgtggcagctcatgcttataataccaacactttgggaggctgaggtggaaggatcccttgagcccaggagttcaagaccaccctgggcaacatagcaagacctcatctctacaaaacataaaaacattagtcaggcgtggtgctgtccttgtagtcccaggtacttgggagcctgaggcggaagggtcacttgagcccaggagttcaaggctgcagtgagctaaaatgccaccactgcacttcagcctgggagacagaacaagaccctgtctctaaacaataaataaaaataagtaagctgggcgcggtgggtcatgcgtgtaatcccagcacattgggaggccaaggtgtgtagatcacttgaggtcagaagtttgaaaccagcctggccaacgtggtgaaaccccatctctactaaaaataagccaggtttggtggcatatgccagtaatcccagctacttgggagactgaggcagaagaatcacttgaacccggggcaggggaggttgcagtgaaccgagatctcaccattgcactccagcctaggcgacagaatgagactccatcttaaaaaacaaaaacaaacaaacaaacaaaacagtaagtaaatatgtaagcaacaaagcacaactttactgcaactttgtcaccaatagaaatcataggtattttacaatcctattgcggttgttacagatatcttaaaattagtttgcattcaactttatttaaaaatggtagtttattaaatttgctattgtcttattatttaaaaacatatataactctataatgaatttatttcttttttatttttatttttaaaaatttatttcttaatgttgtgtcaactgtacctcaaaagaaagtgtttgtctttgtaatcctatgcattttattttgtgcatctaagaatattattgtgagaaggggctcatgatacaaaaacaagagtatttgatctgaaaaatataagttccagaaggaaagtaagctatcagagacaactaatttaaaaaatggaagaagaaaaatatttttagactgaagaatatgaatttccagattgaatggggctgccctgtgctcagcacaataaatgagaaagatccacttcaagagctagaatagtgaacttgcagtacctgtgtgatcaagtaaagaccccagaaatcttccaaagaggaaacaaagtgatatataaagcactgggaaacatgaggccatcagacttctcctcagcagtactggaagtcagaagacaatgaagcaaagcctctgaaattctaaaggaaatcattcccaattcagaattttatatgcagccaaattatctatcttaattgatagtgagtgttgttaacagaaaaacttcagcagaataaaatttaaaagagtttaattgagcaaagaacaattcgcaaattgggcagcctccggagccagggtgggctcagagactccagcacagccacgtagtggaagaggatttatagacagaaaaaaggaaagtgaattacagaaaacggaagtgaggtacagaaacagccaagctggttacagctctatgtttgtcttacttgaacacagtttgaatagttggccacagttgattggccaaaactcagtgattggcacaagagtagattacagtctgtttatacttacagttaggctatagatcaccacgtatggagaaacctttaggctgaatttaaaatacgtaagaaggcagttttagtctaaacttgatttaacactgtagaataaaaaaatttcagataatccaggagtcaggaaatatgtctcttgtgaaaacattgaagcttctgccccagcaaaatgaaagaagaaatcaccaaagtgcagacatgggattcagcaaatgggtaatccaacatggggaagaagagaaacaaattcccggggttatggtgaaggtttgtcccagatcaacatctctacagcagacctagagcgcaggcaagaggatggaggatgtgtacaaaacaaatgcaaatgatcatttatttgatgtgtttcaacatattgggagatttcatccctggcagaaatttgaggataaacagctacttttaaaataaaacaaggctgggtgtggtggctcatgcctgtaatcccagcactttgggaggccgaggcaggtggatcacaaggtcaggaggagttcaagaccagcctggccaagatggtgaaaccctgtctctactaaaaatactaaaattagctgggcttggtggcaggtgcctgtaatcccaggtactcaggaggctgaggcagagaattacttgaacccaggaggtggaggttgcagtgagccaagatcactccactgcactccagcctgagcgacagagtgagactccatctctaaataaataaataaatcaaacaaaccaaaaaaaaaaatgagaaaaaattgaaagttgtagttttaaaaataatttagaaatatggaggttaaatacccaaagaaaaagctagaagagtgattgattattacctttgggagaatggaatagaacaagatttctcaactttgctgctatcaatattttaaagtggataaatctttgtagtgggggggctgtcctatctttggcctctgtcaattatatggcagtatgtcccctactcccagtcgtgacaatcaaaaatgtctccagacattacaaatgtccgggcaggggattggggaaggcaaaatcacccctggttgagaactattagaaaaggagataaggaagaggagtgttttggttataagcctacttgattctttaagttatgttcatgtaccactgtgataaaactaaaaattaaatttaaagttaataggattcacagagattaatggtaattgattagaaaatataattttaagataatgctgttgacaatagcaacaaaactgtaaggtacctcggaataaatctcaaacaaaaatgaacaagaccataatgaaaagaattatgcccatcattaactgaaacaagaaagcctgaatcagtgaagatgtggtttgttcatgtatgagacaacagaacttcataaagaaggatactcttccaaactcaattgtatattaaattgagttctaataataatttccacaggatttttgctggatttgacaagccaaatttaaaaattcataagaaagagaaaagcgtcaggaatatagaactaatgaaagagaatagagagatgatttcactcatatggggaacttggtcagcagcagagatggaattacaaatccttagagaacggatggcctgttcaataaatggcctgggagaatcagctatccatatgaaaaagtaaagtggggtccctatcacatacagaaatcaattccagctatattaaaagcctaaatctgaaaagcaaactgtagataaagatacaggagaataccttaagagacaaaaacacccagcctggccaacatggtggaaccccatgtctactaaaaatacaaaaattagctgggcaaggtggcacatgcctgtagtcccagatactcaggaggctgaggcacgagaatcgcttgaacccaggaggctaaggttgtggtgagctgagatcgcaccaccgcactccagcctgggtgacagagtgagactcagtctcaaaaaaaaaaaaaaagaaaagaaaagaaaaaagaaacaaaaacacaaattttaatggaaaatatctataaatttgactactttgaaattaaaatttcttataaccaaggacaccaaacataacatagaaaagacaaggtgcagccaggagaggtggctcacgcctgtaattccagcactttgggaggctgaggcaggcggatcacctgaggtcaggagttcgagaccagtctggccaacatggtgaaaccttgtctctactaaaaaaaagaaaaacaaaatacaaaaattagctgggcatggtggcgggcgcctgtaatcccaactactccagaggctgaggcaggggaatcgcttgaacccaggaggcagaggttgcagtgagctgagactgagtcactacactcagtctgggcgacagagtgagactagtctgagaaaaaagaaaaagaaaagacaaggtgctctgaaagaagacacctgaatgcacagaagtgacacagggttagtattcagggtatttaagaacttttacccatcaataagataaggataaacttaattgaaaagaaggtaaaggagtaagcaagtaattctaaaaaggggaaatgtacgtagtcagtaagcataaggaatggtgcttattctcattggtcaacaggaaaaagcaaattaaaataccaataatctaccatttcatacttatcagagccttgattttgttctgatattaattatctcccctagtctcagataaatcatggttctgggaaagattttctcatgctaaaaaaaaaaaaagatatctaggctggggtttcatgctaaaaaaacatgaataaataaataaataagatatccaggccgggctcagtggctcatgcctattatcccagcactttggaaggctgaggcgggtggatcacctgaagtcaggagttcgagaccagcctggccaacatggtgaaaccctgtctctactaaaaatacaaaaattagccgggtgtcgtggtgggcacctgtaatcccagctactcgggaggctgaggtgggagaattgcttgagcctgggaggcggaggttgcagtgagccaagattgtgccactgtactccagcccaggcaacagagcaagactccctctaaaaaaaaacaacaaaacaaaacgcacagatatctagtgatatggtatggctctgtgttcctgcccaaatctcatgtcaaattgtgttccccagtgttggaggtggggcctggtgggaggtgactggatcatgggggcagatttcccccttgctgttctcgtgagagtgagtgagttctcacaagatctggttgtttaaaagtgtgtagcacctccttgctttctctttccctcctgctccagctgtgtaggatgtgccagcttcccctcaacttccggaatgattgtaagtttcctgaggcctccccagtcatgcttcctggtgggcctgtggaatcatgagccaattaaacctcttttctccaaaaattgtccagtctcaggtatttctgtatagcagtgcaagagcaaactaatacgtacagggatgtaacagttttatatatgttcaggtctcacagtgttgcctggaactatggcagccatcttatgagtgtgggtggagtgggtttgaagtgaagacactgacgatgagatagaagaactgtggaagaaacgtggtccttaatgacatcgttcagcttcggaattaaccagccctgggactgcccaacaagactgcatgtgttgcaggtgtgtgtatgtgtgtgtgagagagagagagagaaagagagaaacaagaaacaatttcctctttgttgaagacattttgagttgggttttctaataccacaaggcattatttaaagcaacatttctttttcttttttttttttttttttttttattttctgagacagagtctcgctctgtcgcccaggctggagtgcagtggcgcgatctccgctcactgcaagctccgcctcctgggttcgcgccattctcctgcctcagcctcccgagtagatgggactacaggcgcccgccgccacgcccggctaattttttgtatttttagtagagacggggtttcactgtgttagccaggatggtctcgatcttctgaacttgtgatccgcccacctcggcctcccaaagtgctgggattacaggcatgagccaccgcgcccagccccctaaatcaacatttctaataccacacgtcaacgtttaaatcatcctaagtgtccctgatgctacactgtgaactgctcaagataaggaaagtaccttgttcatcattattctctgcacttcacacggtgctcagcagatgctaaaaaattatttactgaataaaggagagaatgctcagactggctctagaaaatattgtaaagtaagtgaattttcttggtatttctttcttggtcccctcttctccttcatcactccacacccacatcctcccaccacaaccacaagggccccgcaaattcttctcatgcaaaatgacaagagaaaaaaatcttccttctttctctatgccccttattaaaaacacacctcttttattcccattcccttagccccattcattgcaaagttaatattgctaatttaattacaccaaaattaatttcttagattccctgtgagatcacatttccatttttacagctacctgcaaaacccctcaaccaaacaagaagcccatgatgggcagatggagctcaatggcaaagtgagtgggtgagatgttgaggggtttcagggtcttcttctagcacctcctagcatccaccatagaggcaatcttgcctctcactggccgccttcctatagaacccatcccagctgaagctcatgaaccagggagtgacacaggcatctccaccagatccaggtggaggagggagtaggcagcactcacactgcacccgggggtggaacagtagtgtgtgaagagaggaacatgaaattcattattcaccggaactgggccagcatttgaactgtggctagcctgttgcccaactccaggtggcgccactcacggggagttttatttccagaaaagcccttcccagaaaacagggcatgtacggtgccccctggagttgtgtgaggataccctactagtttggattcaacaaacaattgagatgagcatggtggcctagagacgatctctcttctgttggtgagtgggcgaactctccagaaccttccaatgcggcctcttgctcaacagtctttttgtggtgaggcagtagagaaatgaaagccatacaggtggagagcagagaccggaggcaggaaacatccctttaaggcggtgttctcagcctggctgcatactggaatcacctgggaagccttcaaaaatactggtgcctgcatgtgatgtaattggtctggggtggggttgggggcagcctggccagccaggatcttgacacactctcaggtgcaccagtgagcggctagcattacctccactgttccaagtctgctttagcaggcaccacaactcccacctaccccaaaccttgtcttgcaccagaagtgtttttactgtcacctgagtttatgctttttaatacttcatgctcattagtgaatctagtagctaatgagcactcctgtagcacaagttaatgctgtttgtccattttttgataggaagaaacccagcactgagaatgtaggtgtttatgtttgagatttacagcgtgcctttcttctttggtggttattttgattcttaaagtgaaaatgttctttctgcctattccctgaggacagagcaagaagataagaatttgagtactgtaaaatgatatggtaaacactgaaaaggactttgaaagttgaaattgttaaacattgaaatggattatcttaggaaagtgtggatcttattttgtagggacctttatttggtatagtttaagttgtgcatatttaaggcaagagaattaacaaaacaatcgcgtagatttttccaaatctgtgacttgaaggatgctacatacagcttccactgcccttcgcgtttctctccgaaacacatttagtaagcagaagtccgtatgcacgtgtgtgtgtattcatataggcctggatgtgcttttaatcccgcaagtatagccatctacagtgaattcagcatcttttcatcaggatgatgcctttacatcatgggtgtccaaccttttatatttcaaaacagattgacaaaatcctagcagggcacagtggttcatacctgtaatcccagcactttgggaggccgaggcaggcagctcacttgagctcaggagttcgagactagcctgggcaacatggcaaaacagtctctatcaaaaatacaaaaaattagctgggcatggtggcatgtgcctatggtcccagctactcgggaggctgaggtggaaggatcgcttgagcctgggaggtggaggttgcagtgagcagagatcgtgcaactgcacttcagcctgggtgacagagtgagaccccatctcaaggaaaaaaaaaaaaggaaaagaaaaacaaccaaaatcttgtacaaactgcacacaacagatacatttgagttaatttttatgtataataaaggcaaccagtaaatagattaaggctggtttgatgaacataaaacaccttagcttttgcttcgaaaatagtgacaaacttactaaaagttgcaaaaagtaaaatagcatagagaattctggtatatcctttactcagatttgcctattgtaaacattttactcacttgctttagcatttgtgtgcactgcgtgtgtgtgtctttctctatacacacaaacagtatttttcgaaggatttgtaactaggttacatatgtcatgactgtttacccctaaatacttcagtgtgtatttcctaaaggtacagatattttattatgtgactatagtacagtcactaacttgataaatttacattgatttaatagtctaccatccttgttccaattctgtcagttaacctaatatgtcctttatgacatttcccccctccactataggatccattctggagccagttatttcatttcatttttatgtctcttcagcctcctttagtctggagcatttccatagtttgtctgtctcttatgccattaacatctttaaagaatacggtcctccctctgcctctctctttctttttttttgttaaaaaaagaacattcaatttttattttattatttagttaatttatgtattattatttatttattttgagataggatattgctctctcccaggctggagcacagtggcatgaacatggcttactgtagccatgaccttcccggctcaagtgatcctcccacctcggcctcccaagtcactgggactgcaggcatgttccaccacacccagctactttttctgttttctgtagagatggggtctcagtatgttgcccaggctgatttcaaactcctgggctcaagtgatcctcttgcctcagtctcccaaagtgctgggattacaggtgcaagccaccaagcccggctgactttttttctgcaataggacagtcttcattgtgtgtttgtctgatgtttgcttcagtgtgaagagattaaggttctgcaccctcagccagaatgcacaggtgctgtggggtccttctcagagcatcacatctcgaggtacatctgatgccctcatcggatgcctgtctgccccttgttgggaatgttaattttgagcactcggtctaggtgttgcctaatttttccattatagaatgactgctttcttcctccccttgtaactaagatgctatctctggggagaaactttaagactgtacaaacactctgctcctcatcaaaatgtccacctagacttagcatccattcatgattctcgcctgttccaatttttacctaatgtttgcaaagtgaggatgttttagcttcagcaccctttccacacttatcagttcatctgtagccctggtaaacaagacagccctccctcatctcctctctgtctccctatctatctatctatctatctatctatctatctatctatctatctatctatctaaattcatgaattcctgtttttaaatcgtttgtacatggttttcatgctaaatcattttggtgctcagattgtaccagctttggctaggggagccccttcaaggtggctcacatgtccccctgctctgccccatccttgattggagcatttccttacattctggcctagaggactatcccaggccagtactgcccttaaacccaggcgagctcctggtccagcatctcaggacactgagtgctttaaaaccaccatcctcataattttcaaagtcctcctctggctcctggcactcaccagggccagcagtatcacctggctagggtgccctgtctcccctttggggtacttctccgacttcactctctcctctccttatttctttcatggggtcactcaagattgggctaccagaatgtgctgacacgcttatttggggtgattctcattcatttggacccatgattcattcagagctttgggctatctgctgtcttggctctcgcacttgagtccctgtgtgcctcgggatcaggacccaaccgtccgtgttctgctctacagcacgtgggcctcaccatttcagccaagggctggtgagacccttgctctgttctcagagttggccaaactgcaaggcctaggggaaaagtcttaaaaggctgccctcacttctgacactatttgcaagtttagggtgtcctaaaaccaccctcagttctaatgattcactaaaagggctcactgaacttattgaaagctgttatacttggtcgtggtttataaagaggaaaaggcacagattatcatcagccaaggggagcgacatgcaggcatcatctgggaggggtttgaatgcagagccctggctgtcctctccccatggagtcatggacagtgctgccttcccttggccacagtgtgtgccaatacagactgaggatttccagccatggaggctcgccctgagccttgggtgcccacagcttttactggggcttgtgcctgtaagactgacctttagtctccaacttttcccagaggtcaggctaatacgtttagtctacttttagtctctagtccctccagaggttaggactgatatggagaggcccaaagtctctctcataaattacatatttggactgtctggcagtcaaagcacccaggcaaacacaaatactcccttctggcaggacgtaccagggttatcctggatatcacttcccagtagctgacggcaaaggccagatctcaacttgggtaaggtaaattctccttccattctgtcctctcttgccctctggtaagtctgaagctatcatagaagagagatcagcatttcctgcctaagtgacactgcccttctcacaccacccatgagcctctcatgtttccttcgtgctgttggtggtctctgcaaggcaagggtgtagccaatactgaaagagtgcaaagtccaggaatgcagtgattcaggcctaaggaggtcaagaaaagacatggttggaagacacgccattctacttttaggctataaaattcagatggtaaatttaacatgtgcagaatgcaagtagtagtttacatttttctgcatcctttaggcatttgagaacatcatcaacaaagcacagaacaacatttgattgagtcaccagaagccagcattcacaggtggctcagtggatgatacaacatccaatgtgagtaaatggtaccagggaactgcagaggcaagagctctatcgtttcaatactaacaggatatgaagaaccatggcattatgagtagcaagagttgctcccttttctctgatacaaatttagccagggatggcacttttgacaataaagaacccgaagagacagtgcctggaccctaggaaggatcttcatgggtacagtttgaacaatgaacgtaggtaggaagctcttctctatcagtctaaagacattgctatcccttacctgatctcatgaattttgcaatacatttttaatcaaatattttatatggacagagagtttacagaaactatttgtctggtgtcccacacatgtgggggtagctgcattcttgacccatcttgtaccccagtcctgcaatcaggcttttctccatgaagcctggttcgtgctatcagagaccaagctctaggtattaggtgaacttggtgaacacaaaactttgaacttaggagtcataggtaatatgaccacatgatcattgtggtcttatatcattgtctgtaatgaataattgtcattttgggcagtctagcatgtgaccttctcttcctcctgctagtactccagctgctgtggggtatccctgttgtgtacagtcagagggaagtggtgactctatcactatgggaatgaacggggctacatgctccttctccttactctaacagactgtctaacagactctcctcactctaacagccacagccagttggaagctttcccctaggaatttcagtgttgagccagtatcacagaaatgtgggtaacaggaggtgaacccagtggcaatcgtgtgcagtagaattgttgcttgtgttcctactgcctcaccctctgagcccttttggtttctgaccatttcccaagattcttttcatctattacctgttgattttctaagcccccagtattaatgcaataaatgtccaaaatctttttgtgtaagacagtactggttttgttccttaaaacaatgaatcctatctgaatcagcatagtatttatttctgggttttggttttggttttagttttggttctgtctttgcttgtttggtatcaagaatatctctattcacttagttaaatgttcgcaagtggtaataatttaacagcttgtcttgcaatctcaggatgtacttcaagtcctcccgaagcttaagagtagagttacaggaaatttccatttcaaagtcaaagcatgtagagtatctaccaacagctcagaatccttaactggtgattgtttaattttgagggtgttaataaacagctttcccagccacttaaaattttttctgtttttagaaaatactttccaaatacatcttataacaatatgaaatgttcagtggcataaataaaaataagttcaaaaatctcattgctcatttctgacacatgtattcaaagtttcaaaacagccaagtttattttgctttgcaaaagaaactttaattaagttaatttaaagcaaaagaagttttaaacaaagtgaagggataaacttcatgtcattttcctcattggtgcattatctgcatttataagcatagtaataaagagactgaggtcagcaccaaacagattagccttttggcacaggtaacacattgcagtctccattattatgtacatttgtatgcgtcgcattgtcgtgtatataagtatgtgtttttacagttctaaaaaatagttattaaaaaaatggaaaaggccgggtgcggtggttcacacctgtaatcccagcactttgggagaccgaggcgggcagatcacctgaggtcaagagtttgagaccagcctggccaacttggtgaaaccctgtctctactaaaaatacaaaaattagccaggcatggttgtgggtgcctgtaatcccagctactcaggaggctgaggcaggagaatcacttgagcctgggaggcagaggttgcagtgagcagagattgcgccattgcactccagcctgggtgacaagagtgaaactccgtctcaaaaaaaaaaaaaaaaaaaaggcagaaaaccaaactaacaacaaccaaaaaaacaaataaaattaaattaaaattaaaataaattataaaatggaaaaaataatatttgaattattggcctctatgcagaatccttaaaaatctgctggaaaccacatccctgctggtaatgttctgcttctcctgtttaatttttaaaattgtgctattctaggcttggagaaagtcccacttccttgctgacatcttctctatgcccaggctagagggaaccttctctctttaataatctcttaaagtgattattttcctttcatggcagaaaaagaggcaagacatgcccttctttgactgttcatcattttgacttgtgatgtatttattttagtttattgtcaactatgtataagccttgttttcccaaattaaaatgcattttatgctcctcaaaggcgtgagccagaccctatacaaatatttgccacttgatcagtatcaaattctacttttgcccttcagacccatttttatctacttagtactgtgttttccaaacatgtcacctgctaccttttaccaattttgccttatcttcataccacgtgtgctatttttactagacacctttttattgcaaataaactcattttttaatctaaattaattcctttaaaaggaagctttcaataaatggaaaaccagtattgtttgccacaaatggaaagtaacataaaaataaatatattaaatacattaaaaaaataagcacaacaacactgttacttattggcctttataaagccagctactattgcctttgggttttgagcctaaggaaaaaagggagatcagagagtgttacagaaattcttccttagctaatcagagaggtttggaaagagcgttcgaaagggaatacctttctttctcagcatgggattcaatgttatctgcattatccatacctaactcagaccgccctggtattatgggtggcagatactcgatgaaaagcactcatagaatatgagctctcggagcctgagaaacatgtcctgtactcagcattcttgctctgtgcatctacacaactcattctccaagagcttccctgctctcccttgcatatctcttcatgatctgggccttatttttcttttcttttctttttttttttctcagctcactgcaacctccaactccctggttcaagccattctcctgcctcagcctcccgagtaggtgagactacacgtgcacaccaacatgcccggctaatttttgtatttttagtagaaatggggtttcaccatgtcggccaggatggtctccatctcctgaccttgtgatccacccacctcggcctcccaaagtgctaggattacaggcgtgggccactgtacccagtcacttctcttatctataaaataagagaattctactggatgccttttccagtggcttccagccctgaccttatcagggtctgtaatcacaagatcactggggttaagcattccagacccctgtttaccactaaccatccagcattagatcacttgccagtgttcaccacggaagctggattggtggctcattcttctaatcccagctactcaggaggctgaggcaggaggatcacttgatcctaggagtttgaagctgcagtgagctatgatcataaatgtcaccctccagcctgggtaacagaaacagtattcagcactggctcactcatcttcaccgtggaagatgacactaccctgtcccttcccaaaggaccaaagttaagcactggaaagatcctttttccttatgacaggcaaagtgctcagggaatatagtggggtttgagcttggttctacccccagaattgccactgttctcccaagtgccaatgacttctgatactctgcacatttaatttccataaagggaagggaatcacagacaagctaaatgtattttagcgtgtaatcccagtttaagttagttaaacggcaactgagctataaaatttgctgaaatcattttttatatatatatatatatatatatatatatatttttttttttttttagacagattctcactctgttgctcaggttggagtgcagtggcacgatcacagctcactgccacctccacctaccatgctcaagtgatcctcccacctcagcctcctgagtagctgggactacaggtgagtgccaccaattccagctagtttgtctttttctgtattttttgtagcaacagggtttcaccatgttgcccaggttgatcttgaactcctggaactcctgggctcaagagatttgtcggccttggcctgccaaagtgctagcattacaggtgagagccaccacacctgtccaccagaaataattttttaaaaacagaatgtcagggaccagtaggacgagtgggagtaagaataggcggattgtattgctgcgggtcctccccacttccggcaacatgaacttcttgaagtgccagcttccttatccttccttgagggatttgggctttgctagattttcattttctctcctagcaattaccttaaatatttacagaaactcttggatctgagaaaaaaacttaggaatcaaatttgtatttggtcttgaaaccactaagtaatacaaaatgcaaataggagttaagatttggaaactggcctttatagagcagttcaaaaaagtcttatgggatttacattttaaaaatgagaatttcttataaaatgagagaatagttgggcacagtggctcacacctatcatcccagcactttgggaagccaaaggggggaggatcacttgagcccaggtgttcaagaccagcctaagcaacatagaccctgtctctataatttaaaaaaaaaaaaaaaagaaaaatgagagaacatatacttcttcaacatgattcatattaatatataaagttatcattttaatgtaatgttatctccaaacaaatatctcatatttcattccaagcaatattaataagaatgtttgcctgcaaatatatattgaaaaaccattgactgacaaaatattgacaacacataatacttaattaagcctgtaagcttgtttgagaatgtgtcatatttcaaaactgaacagttaggccaagtcacctggtgagtcttttgtttctttaaaattcagccatgatacaagggttacctacagaatttagagacaaactccaaaactaacatgctcatcatcctaggaacattgtcatgtttcagcaagaagcaaacccctggaactcttacactaaacaagcttctggtgacaggtgaagctggggtttctctttagccactcctaccattatgggacctgcaagtccaggcttgtactggcgaatctcatgttacaatcactattcaagaaggtggttagaaaagagcagagggtatggttttatctaagtaaaatttattcctgcacaggaacaagctcaggtccacctaagaaatgaaacagccattttttttcaacagacttcttttttgtgtgaactcaaactaagacaatcctctgttctttcttgtagccatcaagccaattaattagagccaaaaaactgataagaactctgtgtactttctctccacttgaaggaaaccatacaaaaatatgtacaatctcgttcactcagaccagcgttgggtagaaatttctttgctctatctataccaacaaggtttgctaagcaaactaataaggtaaacagcacagaggaaggggagggggaagaaatattaactactaagagaagcaacttttaaccactttaaagcacgttcaaacaatctacttccttaagaaatcattagcacaccaatgtctttgttcattaaaggagatgaattatggaattattattctaattactaaagaactcttccctttaccaaaaatttatgcaaagttcctagagagacatgacatttgaatggaattcaagttatcaactttgagctacacacaatggatgatgaatctagtttagatactgagtgacaggctcatgcattttagatgagatggcaaattgccattcgggatattaaaaagcttctagaaatgatacaatgtctgggatttccttcaaagtaatctggtgggaaggagaggtggaaagaaggggatatttaaagataaataagattggccatgagttgatcaacactgaagctgatgatgaatacttgagggctcattatactatactctatatttctaaaaattgtccacaagaaaacatttagaaatttagaaatgaaagaatgaaagaaagaaagaaagaaaaagaaaagaaggaaggaagaaagcaaaagaaagaaagaaagaaaaagaaagaaagaaagaaagagaaagaaagaaagaaaaagaaagaaagagactgagaaccatggctcacgcccgtaatcccagcactttgggaagccaaggtgggaggatcccttgaagccaagagtttgagaccagcctcagcaatgtagtgagaccctgtctctatcaaaaaaataaataaataaaattaaaaattaggccagtgtggtggtgtgcacctttagtgccagctagttgggaggcgaggtagaaggatcacttttccaggctgcagtgagctgtgattgtgctattgctcttcagcctgggtgacagagcaagaccttgtctctaaaaaggaaaggaaagaaaataatccacagacggcaaatagacaagtggtcaggaaactggtagggattgcagggatgcagacagtgctatggctgaagggaaagctcggggaagagggagtagaaggccagcagggcaggtgtgggcctgtctggggtcctctccttgtgttgtggcttgcatttttgtccctccatagcagcaggaaggaacagaaaatgcctgccagagcctgccctgggtccaattctgatgaaggcaaaagctgcctgcagtgctccgaatatgctcagcctctgcctctacctccccaccagcaaggccgtgttttcctccacgcacacctcgagcacaccgctttatcaaaccccattcagaaacactctgtgttcccagcactgatgttttttaaaaatggtgacagtgacttcctcatttgcatttcgtgtttatgaccttctcctgttggcttgacatatagacgtggggcagggcaggagtgcagattagagcagtgctgatattacaatgagagagcaaagacagaagaagagatcgcgttcagcttctggcatttaaaagaggattttgcccagggatctagtgtgacaagccagctttgttgagatttaaaagctatgtaatcatgattcacagtttctttttatctcctcccagagactaccaagagccaggcctggccacctgcactgtggagttttaggttagagatggccccatccagcccaggggaatgcaggagaacaagggagccaggcgaatgcagaggggaaggcaggcgctcagcttctcatcttccctccctgccccctcaaggagtcagttggaggcagctttggaaatacctacaaatgtgctaaaaagctggaaggcagagaggcatctgtcctgcctcctgtccatggctctaggctgcctctctccaccaagctggaggtagctccatcaaagtggaagcagcagtacaataggactaagccgatggaggaaggatggcgttccacgtggtgaacctggaaggtcccacctgaatctgaggctttagggaactgagaagacagctggcatgaggctcagtggctggccataggccttgcaatggccaggggtgaggggacctcctagccaagggcaggtggaggaggcagcagaaactcagccaggtccatggtgaaggtaaaaggagaagttaggcttggctgaagcataggcatcaagcaaccagcctggatgaagctgagacagcagtgggtcagttcctagagctgtgatggccagcagacaggcagaagcaggggagcaaggagcagaggctgggggagttggggggttccacccagatccacctcctttccccagcacctcaagggtttctgatccaaacacgaagtaccttcctggaaagaaaaagaagggagagggaggagagcaagggggatggaagagaagacaaaggaggaaagggaaatggaagagagaaaggaatgtttctgtgatgctcatcatttttatataaagaagctgttacaattattgcatcatacttagatcaacagattaatctggagctgttaatattttttgttatgcagtaagtgggtctcttgaggaaggccgtacattttacattttatctgaacatccgggtgtagcatcagtgactgggatcctgcacatagattttctgtgaatttgactgcagttgttgccccttgcagacatttcagctttataactgaggaaagaacagctgtgaccactggggccccagacaccctgctcttgctaactatctcctctggggtgcagggtgctgtgtctcacagttacagccccccaggaatagactgactacccaccacacatgccactgatgcgactctagcatccgctttgtctggatctcacctactgccccttcatcctcaatggatctaaaggctccccttaccatgaccatgtcacagctaacatggactgccacctgcaaagtgtcagtcataggaccaaatgctttgcaacatcatcgtcatcatcatcaccatcatcatcatcatttttaatcctcacatttaccttagataccaataatatcaacattttccaaatggggaaattaaggcttagagagtttaaacagcttgaccccaagtaggaagtgacagagctgggctttgaatccaggtcattcagctttagatcccataaatgttagcagcttccacaggctatgctgccactaggcaatttggggcttaggtcggccagtggctctgtcttcctgtgcttggaacccgggctcgggcagcccctttgtccaggaacgtgacctgctgcccacccagctgctctcttgtcccacagcactcgttgtagaggtccctgcacggccttccatgataccccttcttcttcacctcacatgcatcactcagacctctgacatcacctccttgttggtagagctttctgtgactccttatggcagcaagtcattccctcctgcatgttcccttgccactgagcctgtaggcagtgcatttcccatggaaacataatggcatatttataggccagtcacctgagctgaactaggagctcctcgcagacaggtgaatgccatcttcatctgtgagtttctagactggagaggatgcggcagagaccatgggctgctttgcttaaggctcatccaacccctgaccagcttgtctttcagtacagcagaggccaagaagcagaaaatgacaggtgaagccaggtcccatgtgtagtttagttcctgccaatcaaaagcattcatgcgagactgattacagactgagctatgaagggcaaaaggcaagggccaaggcattcattttgctggagtggatcttggtttttaaactgtcacagcaatctcctcagtcagacagatctatatagtgtgtagtctatttatatttgtaatgaaaaaaaaagaataaatgtaacaaaactgccctcttaaaggttgtttgttaataacctccaagactcaatttcaatttccatccacttggtctgttaaccatgactctctcactttttcaaagataccaggctttgcattgcctcatatttagatcagaaattcttttaaatttgtcaaggattccagctgttagaaagagagtgggaaatagcaatggagaaagacaatgtaatcaaaaggaaggattactgctgggcagcaaaatccaaaaatgtccactgaaaggttgggcattgttgctcatgcctgtaatcccagcatttcagaggccgaggtgggaggatcacttgaggccagaagtttgagaccagcatgggcaacatagggagacattgtctctacaacaaaagctaaagagctagctggacatagtggcacacgcctgtagtcccagctacatgggaggctgagacagaaggattgcttgagcccaacaggtcaagactacagtgagctatgatcttgccacttgcattccagcctggaagactgaatgatatcaagaaagaaagaaaagaaaaagaaaaagaaaaagaaaaagaaatcaactgaatccctcaaatcaaaccaaagaggcaggaatccaggcttgcatgcagcactcggccttatcttttacttgtatattctttattacgtatctctccacttctaggattctgcgcacctacaatatctctgatgtaccagaaaactgtaaaatgcacaggaaagcccctttggggagcagagtgaagagtgagtaggaagtcctggtagaattttaccagcgaggcaaagggaggctcagtgattgattggagatctagtgagctggcagccaaacctcaggcaagtctcctgacacctgctccattgttcctttactgtgttctttataattgacttctcagtaagagttgacaatggccatagcaggtaccctagaaccaaaaagctgagtctcatgaaatcctgcccagctccaggggcagtcagatggggactgggaatgatagaggatggaaagtttttcatctcaagggttttggtgcatcgtgatgggcagtggtgcggaggacgcatcaacagttgaacgaaactttgtttaagaattgtgtaggctgaaagtgattggtgcttgacagtgctttacccactgctaaaaacaaagtcttaattttgaggtggtgccaacagtttgctccactaggatggcagggagcttccttcggtttaaatatttacattgcattttcagcaccactctcagccttactgtagcaggcaaccacttagtgggtgtttgaagatgacaatgccccacgctcagcccttctttagcgttaatggacaagagcaagctgtatgtcttcttaaataaaacagcagccttttgtgacctcccttttctcaggcaacaccaactcaattattcactcagaactgcaaggaacacttcagacgttactcaagcattcatcatccacccccacccccacaaatcatataaagggaaaataatcaaagacatttaaataatcacaatttttaaaagtataaagcagaacagacagttttattttagatcttaagtgaaagtggattaaggttttccttagaaaacatttattggagaatttcagatgaatttcagttttgccgcctggtgtcgaatcctgctttttaaaccttgtctctgcagagtcacccctttttctccagtcccactctcactgctgttggtctgaccctgtatgtctgtgattggatagacagcaactgtccctaggaaaggcatagcatgggaaagtgtggatgtctcagtgtccctcctgagattcactctatgacaatgactgcatagccaccatcatggccaaaccacacccatcctgcaacacccagcctcttcccaggccctcccgttagcacttggtgctacccattctccgttcatggcttccccattgcctgggtctttgctccaaggtctttgcttttctcaccaagggctttgcttttcttaggtgcatccacattttaaaagcaggattcttatccaaaggaataaaagggaactatccagaaatgtattgaattatagaagtaatgagttggtataaaaacaaaagttcaaatgttgtaagagctcttgtataaaaataaaatgccctcctccctttgcccctcccagtctcactccttaggcagctattaatacttttgaccattcttttttttttgacctgcccctggagctgggcagaatttcatgagactcagctttttggttctggggcacctgctatggccattgtcaactcttactgagaagtcagttataaagaacacagtaaaggaacaatggtgttcctttgcaggtgtcaggagacttgtctgaggtttggctgccaactcactagatctccaaacaatcactgagcctccctttatacatatccctcatacaatatcataattgtataatataaatacaagtaataactctaaataatatgatatgccctatttcttgatttctctctttaaatagtatctatccactttttaccatgaaactgaagagtttggttcatcttctcccttttccctccctcgtcaaatttttgtttattatatttttatctcttggtccttctatgagtcaactataaaaataaataaagaccaatcacatgagaaaagcaaaggctatttattctgagcttgctgtagcaagggagtcagccacccaccgtcacttacattttggcagagactcaaaggcaggcagaggagtaggaaagctttagattagagaacaaggaaggcttcagctatggtcggattgaaggctgctggcatgcggaagctataggtggactaagtagaagtagggtatcctatgtgattagttaggggtgcgtatttggcttcctctggttggtcctaagttggaagcagggataaaaatttaggaagctgtcagttattaaacaagtcctggccatttggggctgacttaggctggctggattgtttatggtagaaaagggcattggtttcctgggcaggttgctgccgatcgtgggtcaaagttcatctacatatatatggcctggccattgcctgcttggctattcagtctctcacgacttcataactttaaacaatagagttaaacttctatttcgtgatcttccaaatgtaaacagtgtttctttctccccattctgtaagatacccacccccaccaccagctaatctccctccctctacctcccagcttcttccagctataccattatttttatatatgaaaagttgtaatcatactatccctttggcatgtgtaaatattccatgatgtgtctataggtcaattttgaaaatcaagagccagtaagcagcatttacaatatcataattgtatactataaatataagtaataacaattttttaaattttattttattttaagttctgggacacatgtgcaggatgtgtgggtttgttacgtaggtaaatgtttcacggtggcttgctgcacctgccaacccatcacctaggcattaagccccgcatgtgttagtaataagataattaaatgatataagtatgatttactagttgaaaaaagtaatgagatttcatccataattgaacttagtgaaagaaattttatatctgtaagcctgtaccactggaagcataatattttaaacatcaatgtaaagttggttctcctttattatacatttttttttctcaaaggcctacatgtcagataaactttcttggtcttgaatatctgaaaatgtcagcgtttctatttcacatctgattgatagtctggctggatacttaattctaagttccaggtgtaggactttgaagacattgcttggttgacatctactatccaacattgtggatcaagtcatctgatatcaatctcattttcatttttttataagtaattcatgtttttctttctagaagctctcaggattgtctttttatcctgttgttctagaatttcaagtggatgtatcctatgggctaaatatttgtgtccacccacctcaccccaagttcatatgtggaaaccctaatgcccaatgggacacaatttggacatagtatttgggaggtaattaggtctttcaggttaagtcctccttaggggattaaggcccttattagaaaagacatcggagagcttgctcccctgctctctgccgtctgccatgtgaggaatcagcgagaaggcagctgtctatgaactagaaggaagaccttcaccaggagctgaccatgctggcaccctaagctcagacttcatgaactgtgagaaatacatgtttgttttttaagccacccagtctttggtattcaattatagcatcccaaattggcaaagacaaggtgtctagaaaattattttggataaagccctgaaatcctcccaccagttattccacctgtgactgaggttggctctctcaccagcattgctataatctcttcccctcagacaaggaatcttcaggtattaattggcaagcttgtcttccaaccccacgcttcgactatgccaatcctattttaagtaactctttgagagacagcttgttatatcagaaggagaaccccatgtgatctcgagggaaggttattcaacctcccaaaacctcaattttattatccattggatcagcggtccccaacctttttggcaccagggagtggttttgcggaagacgatttttccaccgatgggatggcgagggaatgatggttcatggatgaaactgttccaactcagatcatcaggcattagttagattctcatgaggagcacataacctagattcctcacatgtgcagttcacaatagagttcgagctcctgagactctaatgctgctgctgatctctcaggaggcagagctcaggcagtaatgctcactcaccccactgctcacctcctgctatgcagacaggttcgtaacggaccacgggccagtactggtccatggctcaggggctgggactcctgtgttagatggacataacagtactacctcttaagatgtttgtgaagcataaattagagtaaaatgtgaatacaactcacctgccacaaatgataggagttattaggagctaacgaagtgagacaacatatatatatataatgattgtaactgtggcgtgtgtgtgtgtgtgtgtaataaatgtttgtaaactaccatcatataatcattccccaaaacaatgtacttataagaagaaaacctggccttgtccctacataaatggaagaaaacaaatacagcatttttaaagtgtagaagaagcttattagagtggttttcaaaaacataaatgaggccaggcatggtggctcatgcttgaaatcccagcattttgggaggccaagttgggaggattgcttgagcccaggaggtcaaggcggcagtgagccatgatagcaccaccgcactccagcctgggtaatgaagcaagactgtctcaaacacacacacaaacacacacacagacacatgaagattgtggagctccaaagtagatataaatggacaacagaaccacatacaggctaagccacagaaactactatctgggccaagtgtgagcaggtagtgtctgggagggtgtgtggaccctctctgggaaaaaacaagtgcaagaagatgagggaatggggcgttgagaaagaaagtgacctgggagagcaataacaacttctaagctgacaacagctaagatagggaacatagcatgtttgtgtatgcacgtgtgtgtgtgtttatcagtatgtcataggccatgtcaaggaaggagagaaagaaaatagcaataaaagtagaatgcagtaaaataaatgatggcagataaaatatgaaatagatttggtgtttttgaaacatcatcaacaaaaaaaaatgactagtagcctctaaacattttgtgtaaaggaacattttcaggccaggcacagtggtccaagcctgtaatctcaacactttgagaggctgaggtgggcagatcacctcaggtcaggagttcgagaccaacctggccaacatggtgaaaccccatctctactaaaaatacaaaattagccaggcatggtggcacatgcctgtaatcctagctgcttgggaggctgaggcaggagaatcgcttgaatctgggaggtggagtttacaatgaaccaagatcgcaccactgcactccagcctgggcaacagagtgagactgtcaaaaaaaaaaaagaaaaaaggaacattttcagcatatacagaattatagagaacagttcaccacatatattcaccgctcagcttcaaaaactatcaactcatgtcctgtgtcagccatcatccaatatttggtcttttgtgactggtttcttttacttaatttaatgttattgaggttcatccatatcgtagcctgtatctgcattttattccattttaattggtgaatagtattccattgtatggagctaccaaattctgtttatccattcatcacttgatagatctttgggctgtgcctggtgtttggctattatgaataatgctgctatgcacattcatgtctaagtctttcctgtggacatatgttttcatttctcttgggtggattttttgggtggattcttgggtagatttgttgagtatgtttgtgtttaacatttcaacaagctgtcatgctgttttccaaagtgactgtactcttcaatattcctgccagccatctatgagggttgtagtttctctctgcgcactttgcattctctcttttattgtagccatcctagagcgtgcaaagtggtatctcaatgtggttttaactttcatgtttctaataaccaatgatgttgagcatatcttaatgtgctgattagccattcctaggctgtccttggtgaaatgttcactcaaggatttgggccatttttaattgagttgattgtcttcttattgagttatggaagttctttttagactcttgatacaagtcctttatcagatatatgatgtgcaaatattttctcccagccagtggtccattttcttcatattttttgaagtcaaagtttttaaattaattcaacttcaatttatcaatttttttatggctcatgcttttaatgctgaatccaaggatcctttgcctaaagcaaggtcacaaagatttcctatgcttttttctagaattttttacttttagcttttacgttttgggctattatcctttgtgtatgatggaggtacttttttgtcgttgttgttggcatatggatatataattgtgccatttgctgaaaagaaatcccatggaaatgttttgacacctttgtcaaaaatcaatcaaccataaatgccatgaatgcaaggatttatttccagactctaatctgtttcattgacctatttgtctgtctttacataaataccacactgtcttaattaacagggctttgtagtaacttttgaaatggggcagtatggctgggcacggtgggtcaagcctgtaatcccagcactttgggaggccgaggcgggcagatcatgaggtcaggagttcgagatcagcctggccaatatggtgaaaccctgtctctactaaaaatacaaaaattagccaggcgtggtggcagaaacctgtaatctcagctactcgggaggctgaggcaggagaattgtttgaacccgggaggcagaggttgcaatgagccgagatcgcgccattgcactccagcctgggcgacagagcaagattctgactcaaaaaaaaagaaaaaagaaatggagtactagaagtcctctaatatttttttttccaaaattgttttgtgataaagtgatcatttataccagaatttcaacttgcttttaaaacgtggatgccttctctgagacaagcactgtgtctatcatgattgtaattcagtctattacctcaggcagagacatgcatgttcacaaatagcacagccctggttcagccctaaatttcaattgcacacaagtcatacatacaagatgccatggcagacagggctaagaacaactcaatttgctggagttcatttcaggagacttcacgtaggagatggtggctgagaggggccttgaaaaatgggtcagcttcattaagatgagctgaagaaactgatccagggctgggaaggaaatgggtagaggtagcagggcttgaaagcagatcagagaggggtaattttggagaagtggctagagggagaacgcaaggctggaaaagtgaggtgtgcacctcaggctcagaaacctcaggcaatatttggagcagctgagggaagcaggggcccaagggggtaaaaaggcagccaggccattttcctgctctatgcaaaggatacagtcttgccaggtgcagtggctcatgcttataatcccagcactttggaagactgaggtgggaggattgcttgagcccaggagttcaagaccagcctgggcaacgtagtaagactccatctctaaaaaaaatacgaaaattcgccaggtatggtggcacacgcctgtagtcccagctactcgggaggctgaggcaggaggatctcttgagcccaggagttggaggctgcagcgagctatgatcgcctcactgtactccagcctgggtgacagggtgagacactgtcaaacaaaacaaaacaaaacaaaacccacagtctttccccgaatcctgttcaatcctctcaaagaacactctattctggtaggaaaggtacgaggagggagcgtgagccacccacacaaatcttctgctcctacaggaagaataaataaaaccctaccgatgtgagtcgccaataccatcttcagccataaatgacgaagcatttttattgttctttaccctgtatgcttgaaacctggcaggtctgaggattaacatgagccactgtcctgccggagcagaggatgatctttgcaccaccctggcaactcctattaaaggctcaaagcttatgcccttttcttgctccttttccaagttggctgggtgtttttaaaaacttgcctttgcctctagagccttcctatcagccactggtatgggccaaaatgaccaccataagtgtgatgtcccctttttgctaaattttcagactctaatctaaaatggaattgatttgtgtaatgtctgaacccttgagactatttctgcttggaatggaaattgactccattcatgtttcaggagtggcaggctcccagaaatccaacagtgtcttcatcatagattcctgccaacatggttctgcctaataaatatgaacccaggtactggagaccattgatccccatttcagccttctgagagtctcagaacatatgcacaagcaaagcacccacattctggtggctctgggtgcattgtgttgagaagggatttgagtgagatgtgtagggagaggaagcggggcaatgccagagaaatcctttctccatttttatcagatctgctaccttttgctcccttggagattctgagtagatatagttaagaatttttgagtgacaagagttattgatacacatggtcaattggccaacacacagccatgccaacctctttctctcatgagtgacatcctgtagcaaagctgaagaagtgagattcttccttacccagccttccttgcagctaaagacagctatgtgacccagttctagccaatgacatataagaggaagggtgacagaatcttttgcaaaaatgttttctttacaaatgaaagaaaagaggcatttgaggacaagttattttattgttagtttgtgcccctctcccactacttcctgtctcggaattctgttgcaatgtctgaagctgtagtagccattctgtaatcatgaggcctcaagcacaaagatgaaaaaccagcacacagaagatggtggagaaggaaagatagaaagagccccgctctttgatgccatccctgacctgctagtccagcgctagtctggattcctccagacttcttgtttggtcaaataacaagatgccatcattgtttaagccatggttaacagagttttctatggctggcagccaaatatattcaagatagtgtagattctactactttctctcccctaacctctggaagttgcctttacttacactaaaatgtacagaactctcctggttcctgcccagaaaatcaatttattaaaaagagtagctggacttccagtaaaatgctgtagcaatagatgactattagatggaggatgatatagtgatggtagtgggaagggcaggtgcatggctcagggcctctgtgtgataagcagcccttgccttgccctgactgtttcatgagagatacaggaagaccagtgttttcttttttcttttttttttttttttggtccctctctggttaatgagtgggtttaatagtgactacccggaaatatataccccatgcagagctgaagatcaatattactagagggaagggaagaggagtgaggaaggaagggaggagacaaggaaaggaggaaggacaggaggagggagggaggaaggtgataggttcaatacaaacttgaagatatgggggatagcaggggatagaagagttctggagcaacaaacaataccaggattaaaatcagaagctgaggagcaaaatttggctgatgtggtagttgaaagcagccacatgaaggggcaggagggctgtctgaagtgaaatttgtcccgcggggtttgaggatgagaataaaacaatgtctttttttctttttttgaaacagagtcttgctctgtcacccaggctggagggcagtgacataatcacagctcattgcaacctctgcctcccaggctcaagggattctcatgcctcagcctcccgagtagctgggactacaggcacccacaaccatgcccagctaattttggtatttttagtagagatggggttttgccatgttagccaggctggtctcaaactcctgatctcaggtgatccgcccgcctcggtctcccaaagtcctgtgattacaggcacgagccaccatgcccggccactttattttgatatggacagttgactgatgtctcacatcatgtaagatgatctatatattcagcgtccaaccttcaggcacagctggttttcttggagcaacctgtattccaacctgtatgccagagcttccataacaaaactccacagactgggtggcttaaacaacagaaataaactttctcactgctctggaggctgcaagttcaagagtaaggtatcagccagtttggtttcttctgaggtcactctccttggcttgcagatgaccactttcttgctgtgtcctcacatgctctttcctctgtgcacacacatgtctgtgtcctaatttttgcttcttacaaggtcaccagttgtgttggatgagttgaggtcaccatgtgacctcattttaccttaatgacctctggaaaggccctatctacaaatctagtcacattctgaggtagtgggggtcaggacttaaacatgtgaactggggcaggacacagttcaacccgtaacacccctgtaacaaatcgccacagtgtcttaaagcaacacaaattattctcttacagtcctggagaactgtattagtctgttttcatgctgctgataaagacatacccaagactgggcaatttacgaaagaaagaggtttattggacttacagttccatattgctggggaggccttacaatcacggtggaaggcaagaaggagcaagtcacatcttacgtggatggtggcagggaaagaaagagagcttatgcagggaaactcccatttttaaaaccatcagatcttgtgagacttactcactatcaggagaacagcacaggaaagacccaccctcatgattcatttatctctcactgcatccttcccacaattatggaattatgggagctacaagatgagatttgggtggggacacagagctgaaccatatcaaggacagaagtccaaaattggtttcaccaagccaaaatcaaggtgtcagcagggctgcattgcttctgcaggctctcagggagatctgcttcctggatttttccagctttgagaagtctcctgcattatttggcctgggatccttcctccatttcttaagccagcagtggttggtcaagtttttctcactccgtgttactctaacactccaattctgtagtcaaatctccctctgcctctctcatttaaggacacttgtaaatacatttaaggcccacccacagaacccaacgtaatctgcccacctcaaaatccataatttaatcccatcagcaaagtcattttgccgtaaaataatatattcacaaattctggggattcagaaatgaatacttttggaggccattattcagcctatcatgtgtcataaatccacatctgtactgtgcacactgtgcacactgtagctgtacccctgagctggtcgggtgacaccagagttggtgtcactggtgctttcccaatcacaaagagaagaatctgatgagtgtgtgtcatgttctgggggagtggggctgagactagttaataaactcgattcctctagttctgtaatccccatatgccttgcaaattaagtggtttaaggaactcctttaggtccctagagcccaccaaatggaactctcctgaggaccccagtttaaaaagtaatgaggaaaaacagtgaggacaggggggtttgcttgtccctaaagaatcagtcacacagctcagcagtcgagcagtcacaatggaacaccaagaatgtagcactttgctgagtcagcatctgcaaatctgagctgagctgcttctccagcaaagaccagttcccagggtccaccatccacacacttgtttcaggccctcattcctaggtgtgccccggaccaagggcaagccacatggaatgatcctatatgcatttttatgttgatgaaattgggtgaaaatgagagaagactgggagatgctgaaggtagaggaataggcccgtttgcttttctttgatgatagagaacttttgaaaccaaatgtatatatatcacccccatgtattttttttaaagtctcacctaagagatacctatgatcttttcctattttaaaatattttaagcattaagaaaattttagagaattgattattaaacacaagtacattcagtccagctgtcagactttaacattttgccatatataattcatatctctcttttttaataaataaaatacaacagaagatttttagagtagttacactattctatatgatcctatactaatggatacatgtcatgatgcatttgccaaaacccattgaatgtatgacactaagactgaatgctaatgtaaattatggactttggatgataatgatgagtcaatgtagattcatcagttacaacaaatgtactactctggggcaggatgtagatagtagagaaggctgtgagtacatgggggcagggaatatatgggaaatctctgtaccttctactcaattgttctgtgaacctaaaaatactcaaaaataaactttatttaaaatatatatatagactggtcatggtgggtcacacctataattcgagcactttgggaggccaaggcaggtggatcacttgagctcaggaggtggaggctgcagtaagctaagatcacgccacggcactccagcctgggcaacagagtgagaccctctttcaaaaaaaataagataaaataaaattatatatatttttttatatagtgcacacaaacacatataagacagttgaagtaccttatgtacctttctgtaatatcatattcccccagaagtatttgaatttgaggtttattatcccatttttgtctttataattttaccttatgtataaatatctgtaaagaattaactgtatatatagttttgcatattgttaactttgtttcaatggtacactgtgtgtattcctctaaaactcacttttattgttcagaatttgaaatgtattcatgttgatttattcatttatctttaacagtgatacagcaaacagtgatacagtacttcagcttatttatccacttacctattgagagaaatctagcttgtttctagcttttgtgctatcgccaaccatgctgcaaagaacaatgttgtacgtttctgcttatgctcttaggtgctagcttctctgacatagactcttaggagtggaaatgctgggttgtagaaaatgcacatcttcatcattaaagatgtgaccaaattcctttccaaagtgattgtaccaatttacagtcccactaccagtacatgataatcaccattgctccaccaattcaccagcacttgctgttggcactcattttaatatttaccaatctgttcaaaatagaatggcagttggttttaacaaccattacattgggtattagtgagagtgagcatcattgcatgtatgcattggtcattcatgtttcttctgtaaatttcctgttcttgtcctttgaccatttttccccattgggttgttttcctttttctcattgatttgtgagagttctttatataatttggacattaatcctgtattaattacattcattttaaatattggattctattttaaggcttgtctcttaattttattggtcctttgttgcacagaagctttatctttttatgcattgaattttatcagcattttaaatgtttatttatttatttatttttaataatagaggtgggggtcttactctattgcccaggctgatcttgaacgtctggcctcaagtgatcatcttgcctcagcctcccaaagggctgggattacaagcatgagccaccttgcccagccatgtttatattttttaaggattatttaagaaagccctcttggctagcatatctcaatgatgtccttttaattttgaaatgatttttacttttttcatttagatgttaatctccttggattgattttagtgtagggttagggacctaattgtgttattttccttaaggaaaaccaactgtctcagcatcatttattaatttaaaaaaaatatttctccagtactctttattaattttttgaaatctcccaattactttaatgcactgtctctgccatttgtcaagtggtcagagggagcctatttccatgctgattctgttccattggtctatttgcctgtccctgccatcacgtcttctatttattactgtggctttttaatgtcttagctgatagagcaaatctctctaccttgttcttctacatttgtctttctttttttgacccttgcttttccaaataaattttggagttggtttgttaagttccagagacagaaagattctctgctcggattttaaaattaatttggggaaatttatcaataaattaggggaaatgtgatacctgtacaatactgagtctttgccatactatcttactctttaattttaaattttctttttattaacatgagtccataatccttatctgaaactcttagggtaagcatgtttcagaattcagaaattttcagatttaaaaaaggcaaaaggcaatattatctctgtataatatgttacatattatctcccagtgtcaatgctatttacgattttcctcttattttggttgagcacattctcaggtatagtgctgtgcaatagaagttctgcagtgatagaaatgttctatatctgcgcaatcaaatcaatgctcgggctgggctcagtgctcgcacctgtaatcccaacactctgggaggccgaggtgggtgaatcatttgagcttagaagttcgagatcagcctgaccaaaatggtgaaactccatctctgctaaaaatacaaaaattagctgggcatggtggcatgcacctgtaatcccagctactcgggagactgaggcacgagaatctcttgaacccaggaggtggaggctgcagtgagccaagatctcaccactacactccagcctgggcaacagagcaaggctgtctcaaagcataaatataaaaataaaaataaaaattgatgctcactagccacatgtggctatggagcatttgaaatgtgggtaatgtaactaaggaataaaattttaaattgtgttgaactgtaataaatgtaaatttaaataagcatctgtggcaaatgcctaccatattagacggcacagcactagtagtttccagagaaagggttcatgggagggaatgttttgagtccttacactccaaaaatacatttattctaccctcacacttaattgatggtttggctgagaataaaattctaggttaaaaaataattttaccttaaaattgtgaaggtattgcttcatatctccctagcttccagtattgctttttgcttttttttttttttttttgacagggtctctatcactcccaggctggagtacaatggtgtgatcatagctggctgcagccaggaactcctgggctcaagtgatcctcctgcctcagccactggagtacctaggaccacaccacaggtgcatgccaccacactcagctaatttttctaatttttctgtagagatggggatcttgctatgttgcccaggctggtctcaaactcctgggctcaaatatatctctcaccttggcctcctagagtgctgggattacaagcatgagccactgtgccccacctagtattacttttgagaagtcaaaagaacatcttaattccctgtttgaggattgtgatctgcttttgccctctgaaagttttaaggttttatctttgtcccaagcatttttgggcttcctgatgccatgctttgttgtgggtttattctcattcagtgtccagggcatttggtgggccttttcaatctggaaattcatatccttcagttctgagaaatttccttgaattatctcattgattatttctttcctttgttattttctgttctctttctctagaacttctgttattcaaatggtggacattctgtaccagtcttctaattttcttatatttttctcctctttccatctatttgtttttactgtgcttcctgggaaatttttcaggtatattttcccagactttctattgagtcttaaatttgtgtcttcatatttttaatttctaactggtattatttttgttccccaagagctctctttttataacattttttcttgtttcatggttgcaatattttcttacctctctaagaatattggtagatttttaaatgttttcttctacctgtttcctctttttctgttcatctgcattggtttctacacaactagcttgaggctttccttgacagctggtaatccttggttgtcaactcatatacataagagttggggaaggaaatgttcttagaaagctctgagtatatgtctggggtttggcacccattaacctcactgtggaatgatctggctaaaccatttagttgggaaacctgatgtcatctgtatctttaggtgtttcctccttgcctgttgagattcttcacagccgatggttccaatctcctgccagggaggcattggcctggctgctatttttctgttattccagagaagaacgtggacagaaggcttcagcatccagtgtatatggcttactaagtcctccctcccctttccagttcgatacttctgtacttactccagaaactatcttcagtggaaaaaccttgaatcttctgccagtgtgaggggattgtaggggaagatctatggatctgatttttttttcttttctttttgagacaggctgtcaccttgttgcccaggctggagtgtagtgatgcaaacatggctcactgcagcctccacctcctaggctcaagcaatcctcccatctcaccctcttgagttcctaggaccacaggcatatgccatcatgcctggataattttttaaacttttttgtagagatggagtctcaccaagttgcccaggctggtctcaagctgctgggctcaagcgatcctgccacctcagcctctcaaagtgctgggattacaggtgtgagccaccatgcctggacactgatttttaaacagcctttcagataaacctccttactttagcaatctttttttattccatattctcaaaggtgcctgatgccaccaattttggggttattgggtcatttcttctgtgttacagatcaggtctcaattttctccactgccagctttgaattcagttttttgttttgttttgttttgttttgagacagtctttctctgttgcccaggctggagggcagtggcacgatcttggctcactgcaacctccacctcccaggttcaagagtgaattcagtttttttggctctgctaagccgctttataagcatttctccaattttcaaaatttggaaatttttatcttctattgttatctgttatcttctcttcaatgctcttcatccttatgggtttatgtcttcagaaaacagtctctttattgccatttttgtgaagttttgagaggaagaaaaagtcaatgcatttgtttcccattttgtaaatgccagatggcaaaccagtttcctttcttcctccgccctgcaaaattggctgattccaaagcacagcgtctttaaatgcacaaacattattatttttttttttttgagacggagtctcgctctgtcgcccaggctggagtgcagtggcgggatctcggctcactgcaagctccgcctcccgggttcacgccattctcctgcctcagcctcccaagtagctgggactacaggcgcccgccactacgcccggctaattttttgtatttttagtagagacggggtttcaccgttttagccgggatggtctcgatctcctgacctcgtgatccgcccgcctcggcctcccaaagtgctgggattacaggcgtgagccaccgcgcccggcccaaacattattattaaacagctacaatgggtcagtcctgtgcttgtcactaatcagggacaaatgaatagacattgaataaaaggttgctgccacatgaaagttctaaagcaagacatttaagctgactgtctggagtctcctggctcctgaggtccccctgactcttgtccactatcctatgtggccatgattagctctcctgggatagtagcctgttccaggttctgggctggtagggatcaaacacatttgatctaaatcttatgagcactctgctctgaccaagtgctccaatgaaaaagtatagacttttaattctagctcaccacaaatatttcccacaaacatcaaatgaaagaaaagggcagaagcaaagtatgttaaatataagtctattgagtcactctcattagtcaccctgttttgtttgtttttttcatttcaaaccctatcgaagtgaatggagtcgttcttaaccaaggtaagccatagggtcctaaggacccatcgtgtgtaattaatatgaaatgttgacgattcacttgttgaaatggcatattcaatgtgacataaaatataaatgaacctgaaactacatggattgctgcagactgtaggccactctgaatgggtgctttttgtctgaagtctatttttaatatattttactatatatcaagcaatatttaagcactttacaagtattgtactacctgattcaatctctgtaacattatgagagaagtacaaccagtatcctcattttacatatttaaaaaaccaggcccagaaaggttaagtaactgctcaaggtcacacaattagtaaaagaaagagctggctgggtgcagtggctcatgcctgtaatcccagcactttaggaggctgtgaggtgtgaggcttacttgaagccaggagcttgagaccaggctgggcaacgtagagagaccctgtctctacaaaataatttaaaaatcagctgggtgtggtcgcacatgtgtgtagtctcagctcctcaggagtctgaggtgggaggatcacttgagcccaggaattggaagctgcagtgagtcatgatcatgccaccacactccagccagatgatagagaccctgtgtctaaaaaataaaataaaataaaataaaagagctgagattcaaaccttagcagtctaactccaaagcctagaaatgtatggactcttatgtgcattactctaagctaatagttctcaactggggacaattttgtcacccagggaacctttggcaatgtctggagaaattttcggttgtcacaacttgggggaggggattctacttgcgtctagtgggtagataccagaaatgctgctaaacatcctataatgcccaggatagttccccacaacaaagtgtctggcccaaatgtcagtagtgccaaggatgggagagcatgctggtgtgctagtcactgatgctcttctcccagttttacaagttcttcctccaggcatatggtataatttgcatttcttaaagttggtgtaggcatatatcttgcttgggccaatgtaaagttgctgcacttctagacaaaaattttaaaagccagggcataacaccatgtatccttttttatactttggtcaccttggaagtcttagaaacacagagatgggacttccctctgccttcgtccttatgtgaggataaagcagaagagaaccttaagaatgacccatgacagaagcttcctgaactataaatactgtttgtactaatagttttaagccgttgagatttggaattgtttctgcagcataactcaggctaccccaactgatgaggactccatcctcacataagtacatatgtccctgtctcatgtaacctgactcaggtctttctactcatttcccaggttcctcacaaaggtgaatgatttcctgctgcaaagactgtgaggcatcatttttccaattagaagtgttgctttgtcattggactacatatatctggataccataatgataatggacttgcttcccttttaatttcatggtaagcctctgacagaagttgcatagtagttgttgtcataacaaccatgcaactcagattttccaaattaaagcacatacttgctagtctcactatacctcaactagctctagtgaggtcagaatgactaacatcatcaaacctaggattacacgaaccttaaatcccaggaggtgtgggcagccattagtcagagtattcaactttattcacaaattttcttgatgcttaagaaatctaagtgttctggctggttgcagtagctcacgcttgtaatcccagcactttgggaggccaaggcgggtggattgcctgaggtcaggagttcgagaccagcctggccaacatggtaaaaccctgtctctattaaaaatacaaaaaaattaaccaggtatggtggcacacacctgtaatcccagctactcgggaggctgaggcagaggaatggcttgaacccgggaggtggaggttgcagtgagccaagattgcaccactgcactccagcctgggtgacagagcaagactccatctcaaaaaaaaaaaaaaagaaagaaagacagacagaaagaaaggaaacctaagtgttctgagtttacgatttgtagaccttacctcatatatcaaattattctacctggtgatgaattggaatttcactggagtttcacccagtatgattgatgagatatgaatttatggcaagctgacaacataaattaataaataatccacataacagtttattgtttcaactaatgaaaaatctggatactcaatgtaaaacgtatctagattataaaattgatatcaaatggatatacaagatttgtggaatccagtagccatggagagatggtagaagaaaaagaccattgctactacttctccgtggaaaaaaaagcttctgccaggagtatctcattaaggtccttaaaatgccagtcttctcctccctccaacctctacataattttgtcatactgttcttctagtttgaaatgccatcttatctcctctcctctcacccaaatccagcaaatccctccttaatatcaagttcacgtttctcctcttctgtgaagccttctaagccaatactacaacctttcctttcttagcatttataatatggaccatgtattttagtactggactgtaagttctttaagggaagaggtctttgcatataaatctttaatttctacacagcaagataacttatattcattcattcaacagattgagcatttatatcctgagttagacccagtctgacaaaggcactgacatggaggagctcatggtctgatggggataacaggtatggagatgcataaatacattatggcaagtatataaaagagctaaggctgtcctgtggctgcctgaattttacttgtgttccatgcatggttctgttggatcaaggtgggaacagcatacaaagtatgggacacacagggaagcctgacacacataaccaaggggtcctgaagccaaaaagcgagagctgatcagtgtcaagaggataaaagccatcatcaaaagttacagaaagtcaaggaaatacaccaagaaaggcaggtcaaggtggaagcaggtctgggagcttacctatacctgttccagttactgtggctgcataacaaattactttcaaaatttagtgacttcaaacaataaatttaattttgcttatgagtctgaaattcagacatggcttagtggggatagcttgtctctgctctgctcaacgtcatatgagagggtttgaaggctgggaactggaattatctgaaggtccatttacaagcctagtggctgatgctgcagagactgaaacagctgggggctggaacagcttggactcctggaactgtctctttgtcgcaatgtggcctttccagtgtggtctctccagcatggcaccatcagggtagccaggtgttttggttccctaccgctgcacagcaaatcaccataaactgtggcttaaaccatgcacactcatgtcacaggtcccatgggtcaagcataagccatatctttttttttttttttgagacagagtctcgctctgtcgcccaggctggagtgcagtagcacgatctcggctcactgcaagctccacctcctgggttcaggccattctcctgactcagcctcccaagtagctgggactacaggcacccgccaccatgcccagctaatttttgtgtattttttagtagagacagggtttcaccgtgttagccaggatggtctcaatctcctgacctcgtgatccgcccgcctcggcctcccaaagtgctgggattacaggcatgagccactgtgcccggccagcttaagccatatcttttaactggatcttctgcttagggtctcacaaggctgccattaaggtattggctgggctgcattctcatttggagactcaaatgggggaaacctgctcctaagctttttcaggtgtttggcagaattcatttccttgtgttgtaagagtgaaagacccagctttggctggttgtcagcatgctcagcttctgcccagattcaagggaatgggctatagatctcacctttcatggaaggcgtatccatcatgttacaggaaaagcatatgggagtgggaatctactggtttagttacctctggaaaagacaatcagtcaccgtttgccgtttggccacaacaattcacatcactcccacatgcaaaatacatttatttcctctccctccatctttgatttgtctaccaagatatggttcaagggagtgctgctataagttaagagtcaagtggaaaacttttactactacaatctgggagaaaatatttcaaaaagaggatttttcacctgagttgaattcagttagtgctatataggaaggagtttgttaaatgagtgatattcactttaataccattgtttgtaaggtctggtattgctctctgctttatttgtgtctgttttatctccctgacaagactatacactttttgaaaatagagacactgtattttgtgtcttctgtactccttgagtagtgctagtcccaagggagagactcagctcattcctacaaaatacatgaattcctcaattccctgaggccccagtgtataaattactgccaatccttggaaaagtctaacttgaaaaggcctctatttaccaagtccatgaatcacaacagccctgtacatcaagaaatgcagtgtgatttttgaggtgtctgtatgtccagtgaaatttcttccttttggaatgtctccacaaggagtagaaggaaaaaagacaaacataacaaggaatttgactgtgctcacacaacatttggatagctgaggggaaggtttagtcttgcaaaatgtcttcaagggcctccttcctcccatcccaccccatccccagtggagataatttgtagtttgaggcgttgagctggtgaggtgacttaaagaacaattccatttcttcattgtatagaaacatcttaaaagagatgttcagagtcttagatattgttaaagaagatttcaaataaaagctaaccaaccctgagcagagctttgatgaaaaaattttcccagctgccttagtggcttatgcctgtaatcccagcactttaggaggctgagacaggaggattgcttgaacccaggagtttgatataagcctgggcaacatggcaaaaccccatttttgtaccaaaaatacaaaaattaacaaggtgtggtagtgtgcatctatagtcccagctactcaggaggctgaggtgggaggatcacttgagcccaggaggtcaaggctgcagtgagccaaggtagcaccgctgcactccatccagcctgggtgacggagcaagatcttgtctcaaaaaaaagtttttttcctcaatgcatcctaccttctcacttgtgttatttttttaaaactcacctctccccagagtcacctcttcccagactattacaaaatacccttctggctggacacagtggctcacacctgtaatcccagaatttcggaatttcgaggtgggaggattgcttgaggccaggagcctggccaacatagtgagatcctgtctctacaaagaaaaaaaaatgaagttagccaggcttggtggtgcacacctgtggtcctagctactcctgaggctgagacaagaggattgcttcatcccaggagttaaaggctgcagtgagctatgattgcaccactgcacgccagctggggcaacagagtaagattccatctctaaaacaaaaaccaaaacaatcaaaacactctcctgtatttaaccataagttctcttctttctttctcttaaatacgtacaatctacttgaattttattcaggtgaaagtgggaatgactgcaaattgcccaaagctagattctcaaactcaaaagtgtctaagaatcatctaggcagcttggtaaaaatcacaggtccctggccctaccccaaacccctgaaggagaatgtgtgcatgaaggagctgaggaatatgtgtttgttgttgttgttgttgtttttgagatggagtctcgctctgtcgcccaggctggagtgcagtggcacgatatcggctcactgcaacctccgcctccttggttcaagtgattctcctgcctcagccccccaagtagcttggattacaggtgcgtgccaccacattcagataatttttgtatttttagtagaaacagggtttcaccatgttggccaggctggtttcaaactcctgacctcaaatgatctgcctgccttggcctcccaaagtgcagggattacaggcgtgagccacagcacccaacgaggaaaatgtgtttttaatgaacactgatctagaggtggtcttgttctctgtgttttctcagggtcaccactaagtctgaggggagcagcttccaatgctcgcatagctaattttcttttccctcctccacaccccaagtttgcctatgagaagaacagaaaacaaagggtagaactaattgacaaagatccttcctgctctaacatctatgattcttttaattatatctgcccacaattcccagatgttcatagtctccccaaaagaagggatttttctcttgaaaccaagctagacagctacaaatatgttctaaatttcacaggccctgttccctatggaaacacttatgattaaacccaattcccaattcaaattaaaatttagcattagagattgaaatgaaaactaaagaggatgatctcaaagttgctaatttttcttccctcccagggtccttaacaccattgcagttttgctaataacataaggatgtagtagcatcctttgctaataacatcatcttgcatcctggataatcttggccctataagcatccgggggataaaaacacttttcactgcccctgtggtcaatagcttctgtgctgtccactatagacccatgattatagctcctggacaatctcattgacagcactgacctcaatggatctgactgtttcctattagtcctgtggtacaacagctcattcattcattcattgtgccaactattcaaaggatgatgagggaaggctggaatagcagatatgtctctgttcttcaggagttcacgagttctctatccataaggatagggggcatggttggggacccactcctttcatcatgggtaaagattggggacaaacgagaaaagaaaaccaggttcaagaaattcattaactgtttccatttattatatggatcattactactaaaatagacttagagcatcaatcctatcattttgcagatgatgaaactgagactcagagagatggagtaatttgcccaatattacacagcacgtatctgcagcctcctaattcaggactccttctgctatagcaacaggctaagagaagccaataattggcttatatttgccagctgttttcatcaaaatcttcctggttacccaaagggaaaaatggctttctacattttgtggtaggtcattctagaaaagaaagatgctaatcatcaccaaccataaaacaagaaagtaataagccttccagattatctcttccaaccattctcctatagatctggaccatgaggcctagagggctggagcttcagctctcaaggctatgtgggagaggcagagagattggaatccagaatcccaatccctggcaaatgaccactaccacactgctgcatctctgaaaaatatatcttggtgttgacccaaaatatatttaaaagctttgtcacatttttttaaatgtctatatgtgtacgccaatgattgcacaatcaatgctgtgctttgatctgtcacactttggtccttagtgctggtacatatctcaatggtgacaggagtgacattcaaggaaaaatgactcaaagatgctttaaagtttcctaagaagatgctctatatatgaatccctttagcattatttcagaactcaagaacctttagcagatttcatatttaatataatgtcaccactagttcaaaatctatatataataagatagaaaagggcaccactggtgctgaaaatgtcacgttgaagagaacaacgaagaacacacaatcatctacagccttctcactcagcgctgtcaggaaccaacagcactggcaccaccaggagcttgttggaaatgcaaaatcttgggttcaccccagacctgctgaatcaaatctttattttcacaagatccctggggacttgcatgcaggtaagatttgagaagcacaggtctaaggtatttctctatcaatgaacagagcaatgggtagagcagaggagaggcccagaaactcagagttctggtgttccttgcatggccgttgaaaactgtccctaacctctctgggtagcagcttcctcaagtataaactgaggctctggttgaaaaggctgttgtcataagctgctgacacagagcttttttcagtcccaattgtgtaggacagcttgtgtgatgagaattgaatgacatgcatatcacacatttggtatgctcaatgaatgctattaataaaattgtgaatcacaaatgttactcccatttccttcccagctcagggaagaaacggtatgcatgacatgatgcattgaatggggcagcctacatctactttgcctcctgagaatatcctgagcatcaggccagtgttggcttcgccaggaatcctaactcaggtcttgaaagcaagattgttgctgttaaaaaggtgacatgggatttttctgtttcctcattacattgctttagtttctccctgcctgaagcttctttaatctgtaggctgtgggcaccacctttaaagttttgactcacattatctatcccaaagtaaataatgactaaagtggtggcaaagtcaacacattctttgaaagacaatgaatctgggtgttgaatgaaatcagatgccaggaatatatacattgttgttacaacgctattacacaacaggccttagaagaattccttttctccaggtaaaaactacccccgtaccagttactctgggtgaagaaaggcgtctatgtttggcaaggactaaggaatatttgacttcatgaatcaataactattctcaaagctgctattgacctctgatctgcaaatctgtcagcaaagagagattatggtaactatactgctagtaaaatgcaaacctgttggttaaacatttgctgaaagccctgctagtgacccctgttaaagtgaaccaaatttggccacgtgttcttgcaatgttctggaacatcagagaaaaataactgcctgacccaacacagcttagctcctagagagctaagagatttctctgggccagaagcgttggcagggatcattcctttctcagtctctctcttctaccactgggcccgagttagtgggatctgttaggaggtttttgaataataatgactgttctcaatccttctgaagattctcaaaattaatttcttctcaagagtgcttctaccccacacaaagaaaaggtgcaagaatgttttttcttattccttcatctccctcaatgcctatcatagtgtttggcacacaataggtcttaaatactttaaaaatgaacaaagtgttctttccactgtgctccacctatacattgtacaaccatctacttgaacacttaccatgctgaatttcgtggtttatttatatggctatttcacttttttatttttattttttgaaatagattcttgctctgtcacccacactggagtgcagtggcacgattatagatcactgtaattgcaaactcctgggcttaagtgatcctcccacctcagcctcccaaagtgttgggattacaggtatgagccaccatgtccagccagctattaacctttctgtgttatgtctttcaaaagaaagattctttgtcctattcatcattgtttctccatcacttgttacagaacccaagggttatgggcttggttcatcctttctgaggaagtggggtagcagatgatagcaagataaccctcgtttgtaaataccttagtgatggacttaacaatctcttctttaaaaatataagtgcaataagaccttgactaaaagagtaaggttcagaatttcctcataaaaggttcagctacacgttaaaaggagaattggattccaaagtttaaagtgattctatgaaagcctttattaatattttctgtgttcactgaaggaaaatgagcagctgagagcatactaaataagaagataccaatgatgcattacacatctttaattagtactaatgcgtgctatgtaattaatccaatttagcatcccttctccactagaaacatctctcttccctgcagtctccacagaatggtataaatgtgtcctgatttactgcaaataaggtgctttcacttcctcacagtggttccctgtcatgcaaatgctctccactttctgttcttgtgagctggggctggtcccctgggtaacctacagaagacccagacgatttggggtaactttggtttcctctagttggcctagctcagaagacatttctcaagttccttttccaagattacgcagattcgactccatccctgctaacttaaaagtccaactacagaggccacccgttccccactcgtatctcagctcctacctcgtaacagacaccagagtacgctccaacttctggcctcattttccttcaatataattagccgcacataaatgcccttctttattttctaccactagttcccattctgagagttgtaaatcatctcagctcgaattgcccctctttcgtaatatttcaagttgggctattaaccaaccaccatcccttattctctaaaacccaggcaatataacatgacagttgatgatatagcgaattgctcgtttgaccagggacttgagataatacagtatacaaagttgagcagtgactatctttttgatatagtagcttaaaaaatcacttccatgcttcagaatgcaaagcaatgtgcatattgcattacatactctgctaagtcaaaaaagaagatgagattcccttttccaccccaaaatgtattcaggaaggataagaaaagaacaaaaatgactatagaagaagacaatagcagagtctagatcaaggactaaaactggctataatcaatctcacaagaaacaaaaacgaatgtatgttcattgtttcttaggagcatgaccttttggagaaaagtctggaaatctgacctttggcagaaaagatgaaaaactgatctaacaccatttttctttgagaaaagctcttctctacactatatctgaagagcaaaacttgaactcatctatgtcagggccagggctgtgactagccatataatatttctgtgggaattttttttttttaattgctttctttcctccagccagatgcaacccctcaccaggcacgtggcctgctaaattgaatacaagccacattttagcccctttatcccctcagccaaaaacctttgagcagtgactaaactgcaccatctttcataacaaccctcattaacaccctactcaaattctttcaatggtttgttactgctctcaaggtaaaattcaggtttcatattgcagccccaatctcactctcctctcttctggaactgtgatagacaaatgtgagactttttaattctgtcttttgtatcttgttatgccccttttatatttttcatctcatgtgctgcattctgcataatttctccagccctgtcttccagttcattaattctctcattaaccatgcctaatgcttaatatacccactaagttttaaatttcaatcacttaattttttgtctctgtaaattcaaattttaaaatctgctgtatcatttttattattttctataccctgaaaatattttccagcttgtctatttgtttgtttatctgtttctgaagtagtaggcttagtattgtaagaaatcctttttttcttttttcctttgagacaggatcttgctctgtcgctcaggctggagtgcagtggcatgaacacaactcactgcagcctcaacctccctggactcaagtgatcctcccacctcagcctcctgagtagctgggactacaggggagcagctaattttttagtgttttatagagagagggtttcaccaatgttgcccaggctggtatcaaacttctgggctcaagcaatccactcgccttggacttccaaagtgctggaattacaggtatgagtcaccatggctggccttaggtaatttcaatatctaaaattttgtgggtctgttctgctgtgggttgtttgtttttctttttagtgtttattcattcattaatttattactgtgagctatgcattttccttagaaaattatttgagggaattgcttgaggcctcagatgaaggtggggttctctgatatttacatttgcttctgtcaggttcctgaaactattaccagtctggaacaattctaaaatgagtttatagcttgaggttttctggactgcctgggtgatgtgaatttgggctgcaaacccatgagaagacttgttttccattatagtgtccttgggccagaggattgattcctcctgatgtgctcaggtccaagaagactttcctggaaggcaaggctatttctggttcatcattaaacatgaaaggtatagtcctttagggcctcaaggttgtgtgtggaagatcttacattagattatttgcttgagcaagccctgggctttgttttttgtgctccttcatccaagggaccttgacaactgaagtccaatttcagaaagcactctccatgttctatatattttggagggtttctccctttatgtagatttttttttattttcataattgagattttattggttgaggatcagtacagacatttcaatttgtacacaattcttaacatatgtaatgaaattctaaaaagccatgtattgtaattaattcttttttaaagttattccagtgactttccagcttaaaatttggaagcaaattttccttaagaggctatcaagtactggtatcttcacacgttggtcagctgttacatacagcccacctgaatagcacatacggccacaactgaatagcacgtacactgcatattcatatttgtaatctttcacagcacagtaacaatgttattaggaaaacaggactaccaaaaccaaagatgttacagagtgcacacaattctgacagggagagccatgatcagagtggttttctttaggaaacaattctactaaaaaacaacatgggaatagaagtaatttaaaatgttcaagacattaaacacaggactgactccatattgccatttaatatgctttgtattataggatataaaaactaaccccccatctatggaatattaagctgacacccgagatagtcagagcctcccgtaattcaatatcccacactattttctggttgtaccaaaaaagaaacagccagcaaatgatttcacctcttaaaaaaaagcatttacatttaaaaaaaagggatgaggtgggattccttccttcttaaaaatgtttcagccgggcgcggtggctcacgcctgtaatcccagcactctgggaggccgaggcaggcggatcacctgaggtccggagttcgagaccagcctgaccaacatggagaaatcccgtctctactaaaaatacaaaattagctgggcatggtggtgcatgcctgtaatcccagctactctggaggctgaggccggagaatggcttgaacccgggaggcggaggttgctgtgagccgagatcacgccattgcactccagcctgggcaacaagagcgaaactccgtctcaaaaaaaaaaaaaaaaaatgtttctagagctactaaaaaatttgcatttacagaatagctgataaaaatattcctctggattgtacaagaagggagacagggaccactgataagacatggtatatggtattaatcagacttggcttctttctctcctgcttcatcagaggctggactctcctcagttttcgtttccccattttctgcaggtaaatcttctttagtttcttggttagccacttcagtctgttttccctttgctccccttttcccttttgtttgcacttttttgtctgaagatttatccttcgctgctgcctttttcggctttgcttccacttttgcaggaggtttagctgacaaccgtgctgatctcctcttgggctcttccttggcgccccccaccccacctttatgtagatttttaaactaactcaataatgctagctgggcctggcacagtggctcatggctgtaatcccagcagtttgggaggccgaggtgggcggatcacctgaagtcgggagtttgagaccaacctggccaacatggtgaaaccccatctctactaaaaatacaaaaattagccaggtgtggtggtggatgcctgtaatcccagctactcgggaggctgaggcaggagaaacgcttgaacccaggaggcagtgattgcagtgagccaagatcatgccgctatactccagcctgggcgacagagtgattctccttctcaaaaagaaagaaagaaaaagaaaagaaaataataaaataagtgctagctgcaattatttctactatctttttttggttactcatgaaaacagtctacttttaaaaagcatgggctaaaaaaagagggggctagaaactatctggaacagtaaagtatgtcgatgttttagcttttcttttttctgaaaatatgtgtgatgtgtttagatgagaaccagaaaaaggcttttcactgtgtctgtactgttattcttttcattccatggggtgttactttagcacttaactagagaagatgtacacacagttatagaaagagctcggggctcctcatagcccatcagattccaccatttgatttacactgagtgaaatggattataaacatttataaaagtcaccagagcaaaggaataaagtgtcctgaggagcaccaggaaaagaatcaacattttagactagaaatatgctcaccaagtatctggggagtaaaatgcaaaccacagtatgtgcagtttggaaatattgtatttgttttacatatcagcctttacacaggtcttccaaacttgcagacctgggctttagttgatttccactcatgcaggccttactcatcatcatttcaaatgttgccatcactatatattaccatcttccactgtggcttatatatcatgctgcctggatcagggatgttgtagaagtgagtttgctcctccagtggatttcaggccaacttttcctatgtcatgtctaaagccaaaaaaaaagaaagaatgttataaaatgggtaacacttccctatactgatgctgcagtatggtggttatatacgtgaaagaaaaaaaactgcaacaaaacaaaacaaaacaaatgaaaacctgttttgttcctagtgggataatgcccctgtgctttgtcagccagccatggcataactgccaatgtgctgtcagtcacatctgcagggagaaagagcatgcctgtgtttatttgcatgacttggttattttttaagtctccccaggttattgtaacatgttggaaaggctgagaattgctaactctcattattgtggagtaaattttaatagcccttaggcttgacaaatcatgtttctagctgataataggagagatattattatccccaacttacagatgtcgaaggcaaggctcaaattatttaaaggcctattagggcttaagattaatcactgcttaagtaccaaatgaaataaatgcctttgaggagagcacacttccttaacttttccttcatcttaaataaaggaccctggaatcagatatgcctagaatagggaaggacttcagctgtaatgaggaaactgggaatcagagagccagagcttatcttgcccatctttatgttccctgcactgtctcatcccatgagctcaataaatatttgataaactaaatgaaatgaggtgaccaaggtcacacagcccccacacctagcttccagcctccaatggcgctatacctgctccatacctgctccccctacagaggttatctgtccctgtgtagctgtggagaccacacctcctaccttgtgtgggtgagtcaaggtttcaaatggtctgtctctttcttcccaaagtacacttgttttgcttttccagcatgtgcaatgatttttttattctaaaactatggtagctgtccacgacagaaatacccgtcactaagtcagggtctagagtccccaaacatcgccctctccttccattataacactttttaaatgtataagaaaagcaagctggctcatgcctgtaatcccagaactttgggaggctaaggtgagaggatcgcttgagcccaggagttcgaggccagcctgggcaacatagcaagacctcatctctacaaaaatatcaaaaaattagctgggcatgatggtgcatgcctgtagtcccagctactcaggaggctgggtgggagaatagcttgagcccaggagattgaggctgcagggagccaggattgcaccgctgctctccagcctgggcaacagagtgagaccctggctctaaaataaacaaataaatgaaaattaaaaaaaaaaaaagaaaagcaagttcataaatgctcttggttttgtgcaggaattgtttactcattcacacaggggcctgtctctgtaccagttacaaagagccatgaccgggaatatctctgaggttttctcttgcaccgtcaactttctggtttcttatgagttgtgcttctcctcaggtttcacatgttattctgtttctccagccctgtctgtggacaatgttatctctcattcacacttttgggcccttaggcactgtgcaacctcaaccactgcctcctcccataactgccactgcattcatccccaacccggtccacctagttcacctccgaaggtggtgggagtgaagctggcctggggttttcactgtggtagactgtgggggtctctgcaatttgggccacagggagagtgaggggtggggcagacggagaccaaagatgaggagagagatggaaattgtttcctgagctgtgaggagctgcctggactttgggaatgtaaggagagctagaatattctgttgctgttgtccttgagtgcagcgccctgggtcggggagccatggggagggaggtaataggtctggatgacatgccaccatcaactagagaagagccagcctatcaaggaacccaaaagaaagtggattagcaggctgtgctgacagaccagtcttgaagagagggaggtctctcaacactgagatggcattcacggacggtgcgtgtcccgtcactcaccctccaacgcaaactcccagaagacgaccactgccttggtgctgggcacatgagctcagaatgtatgggggtgtatgtggcatggagtgcagacactctgttgtatagactcggagacaaaaataatcacggtgtggactgcattaggagtagggagtcaggcttgcttgggttctaatcctggccatgtgacctcgagctagctcctaaatttctccaggcctcagcgtccttctctgtaaaatactgcctactgtaggccgggcgcggtggctcatgcctgtaattccagcactttgggagaccgaggcaggcggatcatgaggtcaggagtttgagaccagcctggccaacatagtggaaccccgtctctactaaaaatacaaaaaattagctaggcatggtggcgggcacctgtaatcccagctacttgggaggctgaggcaggagaatcacttgaagccgggaggcggaggttgcagtgagccgagatcgtgcctctgcactccagccccggggacagtgtgagacttcatctcaaaaaacaaaaacaaaaacaaaaacaaaaactgcctactgtagagggtgattgctgctgctatgattttatacaaaaatatattaaattccccaggtatagatttttgtatttggtactaagataaacaaaagagatttaccaaaaaaatcacattctgtgcatgtaacaaatactcacatgtaccccataaataagtaaaatattatatatcaattaaaaaaagacaaagtacgtgttcttccactgtgcattttgttatctggaaatccataatagaatatgaagatatttactattaactataacccttaaggatactttctgccaggtgtgttggctcatgcctgtaatcccagcactttgggaggccaaggtaagaggatcacttgagatcaggagttcaagagcagcctggtcaacatagtgagaccccatctccacaaaaaatttaaaaaattagccaggcacaatggtacatgcctgtagtctcagctactcaggaggctaaggtgggaggaccgcttgagtccaggaggtcaaggctgcagtgaggcataattgcacgactgcatgccagcctgggtgacagagcaaagccctatctcaaaaacaaaacaaaacaaaacaaaaaaaattttctgaattgtcaatataaagaatactgtattcagtataatttactaattgttatatttctactgaattctcatttttagaaaattaataattttaatatgttatctaatgtctttctgcttatctaagtgtttaattaaccagaaagtcaaattttggagctgtgctgaagcattcatagttgcacatgtgatattatgtcctaaataagtaaaaaattgagtgggagcaagaaatggtatcagaccagggattctggtcatctccctggaagacttactgtgtgctgtggctttgtgactgacgggttgtgtgtatgtatgtgtgtgttgcttaagctacaattcaggagatactaataaaatccattcaaaatgaacttacagctactaaattttagaagtaagagctaaaacccataaatctcaggcacaatggagactaataaaattttgtaatatattttattttactacttcaaaacaccctttactaacatgagctaattaatcctaaaatgactcctacatgaagtttactattatgatctctatttcctgctgggagaatggaagatagagtgattaaatgatatatttaattaggattcaggaattttttatattagtccacaattttaactaataatcagaaaattatttcggtttaaaaaaagttgttgaataacctttttgaccattatttatctcagaatggcctgatcataaaaagaattctagcgttttcttgtcttaataaaaaactgttgtcatggaaatatttcagatccctccatcctccaattggctgaatctgaacagtacataaacaagcagattaactgaggctcagtgaagtcttttacggtggaagtaacgtctggaaccagctgtattacaagcctttccaaagtccatctcccaggacagggaagagagaataaaagaactctgttggaggctcagctgtactctctaacaatggcttcttatcccaactgactaagttctctcactctatctaaatcaaatacactaaatcaattactgcttcttgtgcagaagtcttatctattttgattggcaaataaaaatgaagttgtttactaggaaagctgtggtatgacaatattttccaggcagtttgggcctggggtttgcatttaatttaatcaagtgaatttgtgaactgatagtgccattcatttcagtcaggttgggggacctgaccaatgcatgattttatattcacaacaaaaatattctccttccttccctcaatacaggaactctgcatcaaatcgctttccgtgaatttgtttccatgcagtggtgtggaagagcaattataaaattaattcagagcaggaatgttttatatcctgaatgaagaagaaaggggagattggaggtgctaccttaatgtgtgcctggatccatcattcctgaacatgctgctgttttatttcattctgatgtggtgtttctcccagctcctaagctccttttggcatatatctttttgcagaactggaaaaaatttgaaatgagaaaaaatgagttgtggctgttttttgttttgggttttgttttggtagaaatggggttttagcatatttcccaagctggtctggagctcctgagctcaagggagccgctggcctcagcctcccaaagtgctgggattacaggcatgagccgccacacccagcctaagaaatgggttttgttttgagatttccacaaccacactagaagtggctgacatcctgggagtgagtgtggaaacttcaagactggcttttgagaacctgagtctagggcgtgtatcgggtgcttcttatgttttcgtgctcacttgtgtgggaagacaagatatgagacaaaaagacacacatagctgcaggcacacacgtacatgtgtatacatattgctggtttagaaggccttgagcctttgggatactgaggccagaggatcacttgagcctgggagtttgaaaccagcttgcgcaacatagtgagatcctatctttacaaaaaatcttttaaaaattagctgggcaaagtggtgcacagctgtggtcccagctattcgtgaggctaaggtagggggatctcttgagcctgggagatggaggctgcagtgatctatggtcacgccactgcactacagcctaggcaagatcttgtttttttgtttgtttgtttttgtgtgttttttcttaaaaaaagaagaaagcagcctggagtaacataggaaaaggattatattaattcttcaagagagagacaaggacagtttgtctaaacttggagcacttataacgaatatgataaatcattcatataatttcctttataatgctggagttgaagaactagaacaaattgctcatcttatgaggccaggctggtggtgaatcaagccagtattctgccagcagcatgaagggggtatgtcatgggacgtcataattaccctcatgctaaaacctcaaaaggttaaagggccctgagtgaaatccccaacaccttgtggctcttaatgagtgtttactgtaatgataaatgataaaagctctctctaaatctgttgctcactgacttaactaaacttttcctgatttatttttatgctgaggcttttatctgggactaagtttcataagcttgcagtccatggtgtaaagtataaaatgacttattttaagcttcaaaggatgttctcaaatttgggcattccagaatttaatgaacagacagcctgtccctcatgtgtgtttatgattggataggcttgctttattttaacctgataaacccggagactcatcattttcaagggttagtctcatgtgaaaacacatctatatcaagcttttacacaatgcagttattacattttggggaatgtggttgtatgtgcgttactaagtatatcctaaagtctactgagtatttggaatttatagatacagtcagccttcagaaatatcatctaatttattcacatatccactttgtgaggcaggaaagggtaggcttatgtgagtatcctcattttccttactgaagtgggaaattcatcctggaggaaggatctacatgagagagacattcattgcctccaagtgagtatctttgagtcgtagaagagttatttgccttgaggggccttatattgactgagaaaggggggtggggggatgaggcatgctgacttgaagcaagacaaagacaaaaagctcatttactttcgtgatcttcaggcctgttttgctgccgagagagtacatcagaatactgtttggaagcccccttaataaatgcaaactggatcagaatttcagaatgacatttgcacacatcagttgccaacataatattcacttattgcatgattatttaattggtgactcctatgtacaaggcagaagctttaagccggggcagcagtgggaaacttaatgtccacagtccctgcctcctggagcttacacactggtgttccagggcaaaacaaaaactagtatatatatgcagcttaatctctacacaaagaggttcttctttaacaactgccagttcgcccctgtaatcccagcaatttgggaagccaagccaggaggatcactaaggccagcagtttgagaccagcctgggcaacatagtgagacccctgcctctacaaaatacttatattttttaaattagccaagtatgttggctcatgcctgttgtcccggctactcaggagattgaggtaggaggattgcttgaatccaggagtttgagagcagctttgtcaacatagtgagactctagctctacaaaaaatttaaaaaattagccaggcatggtggtgcacacttgtagtctcaggtgggaggatcgcttgagcccaggaggttgaggctgcagtgaactgagatcatgccactacactcaagcctgggtgacatagtgagatcctgtctcataaaaggacaggaaaaaaaaaaaaaaccctgcccctctgtggtctgatctaaggccaacccattcccttaacaatctcaattgggagatcctgggagaaaagaggaggtggggccagcagggcatgtgtttataccatgtggctaaatgctgcctctcccacgctctctcctcgaactctactcttcatttttctactggcaaacaagaccaaggacatctcaagtaactccttgagtccattagagcaggccagaagagctcagaatccaggattccacgagcacatgatcatggagggtgggtggggatgctatatctgtgtttcctcttttgagaaactaaaggaattgtgataagaggtgaagaactaggacagtgtcaatagagcaagggagaagggtacaaagagaagataaaaatcacaggaatttttgtgggggataaggaaggagaagtatctagaaggattccttgctttccatgcaactataaaataatggaactgattcataaggaaacaggttttgagtacggaaaatgcttgatttattctgactttgtttgcattcacatggaaatgtctagtgaatgtagatatatgagtctggagcttctaagaaaacttgggctggagattacaaattggagatctcatacttcttgcttctccctaccgaacttctgtgataccagccatttatggttttttttctatctcactggccactgcttttcattttctttcatgaatgcatcttctaacaccttcatttacatattcttcaggcaccaaaacccttcaaacccctctatccaaaagtaaaccaaatcatcctccacaccactcccaggctactgctactagccatctactgcttccgtgctccctgtctcaagaatgacataattatctgcttagccagcagatccagaaaactggaaagggtcctcattcttccttctctcttgtctccaactagctctttactcttgagaggctaccactcagattacctttcagatatttcctcctctttctggatcttttatagcaatcttagttcaaagtccttacctgggtcactgcatcagtctattgctttcactgtcttcagcggtgatctttctaaaatgcaaacagaatcttatcacactgacattgccttcttaggtaggtcatttccatgtggtggtaaagatgaccaccagtaacactagacttgcaaactatgtcatcatctttggaacctcagtggaaaaaccaagccatttaaagcgtattccagtaaaaagtccagcgtatgactcttactgacccacttgggtcatgtgcccattcctgaacccatcactgtggctgggggtctggagctctgattggccatccttgggtccagtacctttcttcagggaatggagccagccccatccaaatcaaatggatggagagagaggaagggttgactacctctaaataaagagcaatctggctatagaaggaataatgaatgaagggtgggcccaaatcacagatgtttcaaaaatcttttatttcacttttaagaaaaccatttcctacatgtctaccctaatagagtcacatatggctcctaaattaggcttctcactcagactctgtgtctctgattatactacttgttctgtctggagttcatttgggggataggtgggtgggagagagaggatagtttcagttgaggacatactgaatttgagatgtccaggagtggctgtgtggtcagttagatagatacatacacactgacttggaggtctgggacagagatatatatttcagagtctttggtgaagagatagtggttaaaggcagaagagagaagattctcacaggagatatataaaaggtaggaagagagaagaatctagcaatgaggtcctcagagttcattggacagaggagaagagtctatgatggaaactgaatagaagaagccaaaagggtagaagggaaagcaggcaagtgtggcatcagtgagtgtagggaatacaatagaaagtttccagagaaaagagatctctgtggtggataccattaagaaaacaaatcaaataaatagtaaaaagcatcccctggctgaagtggcatatatatcttcattgaagttaatgaaaaaaatgtcagtggagtatgagaaccagactggaagcctgaggggataaatggtagtgaagaagtgtagacagcaagtgtagacattcgatcatgaagagaagaagcaaaataaggtgattattagaagaggatgtgaagtccaaagagggctttttacaatttatttttttaggttggaagtacatatctttgtttttacttttttaaaacttaatctttgcaaattagggaggcacagccttccgtgtgaaattaaggtgagttcccaggttagaagaacatttgaatgctgatggaaaggatccagtgggcaagagagaggatgcctgggagagaatgcattctaggcttccttggaatgactgatctctaataggaaaaggacaaaaaaggaaagaggaggacacggtgtggatgaggatgctttctgggtgtgtctgtggagatctgtgtgatgatttctgttttctcctggaactaggaagcagagtgagctgttgagagtgcagagaaggggagggagctaaggacgatggaagcccaggtgaagttggtagctgggaactcaaagtgagtggaaactgctgaaatcctttactttcttcagtgagtctcagctacgcagattcaagcttgaataaagcagaaacagcagaggacagaggaaagggctgtttgggagtaatttcaaaagaaagactggaacgtgagactgtgttgtgaaagctggacaagaaaggtggtgaagttaaaaccaaaaggtctcaaaattaggagaaaatggaggggatcgtgcttttggtgaagtcaaagaccatgtaacactggttggggcatgagaagtctgtggtgagtaagctgagtttgagccgggcacagtggctcatgcctgtaatcccagcactttgggaggccgaggcaggcagatcacaaggtgagaagtttgagaccagtctggccaacatagtgaaactccgtttctactaaaaatacaaaaaattagccagatgtggtggtgtgcacctgtaatcccagctactcaggaggctgagacagaagaatcgcatgaatgggggaggcggaggttgcagtgagccaagatcgtgccattgcactccagcctgggcaacagtgtgagactccatctctaaataaataaataaataaataaataaataaataaataaatccctgagtttgaaggtagagcagtttggagtgttgataaggtccagggcatagagagagaaggtcactagatatgaggaggtcaaggacctgagaagccaggagggtgggtgggaatctgggcacctgttcgttataccataggtggattctatgccagaagttgaggtcgatagaacctcatggtgaaccaagtaccagtcttcactcagtatatctgtgttgagggagggggatctgtggatgccagtggcaagaaagaaaaagcgtacatgacatgagtctccaagaagtactttacagtgtcaaacaaactttaatgataaaattaaagaaagtaaatgaattttcaatgtgctgcagttttaatatagggtaattaatgctataaaataacagacaatttctgattaaaaacatttttttagaaagaagtgttctagcctggagtgcagtggctattcacaggctaaatcatagcactctacagcctggaactcctgggctcaagcgacccttctacttcagcctcccaactagctgggactacaggtgcacaccaccacacttggacaagatatctgagtttttaaaaagtatgtgagtatgcatgattatgagaaagttctgctatcaaaaagcataggagttttgccagccacagttgttcacacctgcaatcccaccactttttgaggctgaggcaggtggatcacttgagctcaggagttcgagaccagcctgggcaacattgtgagaccccatctctactaaaacacaaaaaaattagccagacatggtggcatgcacctgtagtcccagctactcaggaggctgaggcaggagaatctcttgaactcaggaggaggaggttccagtgagccaagatggcgccactgtactccagcctgggtgacagagggtgactccgtctcaaaaaacaagcaaacaaaaaataggagttttgtttgttgcatactaattggagttgaggcttcgattagcagatcttggggaccatacagaataagaggccattagctagcagggcttcctggaatgatctatgaaaaggtaacaaggccatttccccaggctcagtttcaaccgtgggagacagaagatgtctctagccatgatccaaagatgtctggttttaggataaagggaaagagaggaggaggtattatatttgtaacaatttataacagtagttggtcttagaagtcttcatgctgaaacaggcagggagaatgtattattatagaagccttcatattggctgggcatgatggctcatacctgtaatcccagtgcttcgggaggccaaggccagaggatcatttgaggccaggagttcaagaccagcttgagcaacatagtgagaccctgtctctctctcttttttttttttaaaaaaagaagaagttttcatactgaaacaggtgggaccctccagaaaaatcagactttcttagccatcacagcctttcggtgcccagaaatttgctttcatttggatgcttttgcccatcttcgaaaattctaagattgagcaggtggcctgggtggacaaggccaatggaagcatctctgcctctcccaaaatgcttctaaggccatttctctccttccaataagcaatactcgctgcttcctggcagatcttcattacagctggccccagggaattccagaggcaaccatgctcggggaagcaaaggctgagctctctgggcatgaaacaacactgaaagctttttgtcctagtacaggcgtgagtcctgatgtttttattgcaccttcacagttcagaattcactttctaaaactcctgctttgtttcctgaggatggacttcagattcccttaaaaatctagtaggtacactggaaaacccaaaagaaattataatgcagcccctaaattaattcaatatattgctatgagtcattggatatgaaggattaagaaacgttgacagcttttccatctgataccctgagataaggaggctcatggtgcctaatatcttacatattttatgtagaaatgtgatgtctggacaaatgcaataatctcttcctattgtctcattctcagaggtctcatcctggactgggcatctgttgcccttgtgtgttcagtgccctcattttatctggagaccttttctttcctcatgctatatggtccctgtggggctgtcagctactcttccctgttctcttctcccccatgcacaggggtgggacagtgacccagtctacaccttccttgtttggtagaatagtttgggaggaagcagttcttcccagcacccccagctttattaaggtgtaattgacaaaaactaggttttgtttatgtttttttttcagggagggggtgtagcttgggatgcaagcagtctccttatttactacatggaaagaaccagactgcagaatgaagccaagcagaaacacacagagctgagagatagagccctgatgatatcagctgtacttctagactcagccatgcttttccacttgtatacaaatggtagcccaggataaacatggttctgcactttgctttttaaaaattattatttaacttgatataccctcaagattactccacatcagtgtagagggagcgtcctcatggagttacacagcgcttcactggctggctataccaataattgattcaactacttctttattggtgggcatttaggattgtttccagtcttttgatatttcaaatgcacatgtcacttcatattttgccagtgcagatagtcttagacgtgggattgctggattaatgaggaaataccagtgtaatttgctagacacagacaaatgtctcctcacaggggttgctttgcattctcaccagtgatatgtcttgtttcccccgtgaatttgccaactaagtatgttgtcaaacctttggctttttttaatctcctgtattttaatcctgttctcttaagttttgcccttcttgaaaaggcagagaagtggctcagctccagccatagtaccaccgtgataagatgggagcactccccaggaatatgttcaagagacatcggtgaacagaatctagagtctatggaggaataatctctgttgggatcaaattttgacatagtcggtgatactgaaagaatagttcatagaactagaagattattattccaaaaggggtaggagtggagggcggacagtgagcatgatgggggttgcattgggggatgagcgctggaaaaattgtaaggaaaaacataggatgtttgtttgccactattagctgaaggagttggttttgttatctcaactgcaaactcataaattgtgaaggcgctactgatcattaaagagaatttccactatgtgaatcccctttctcttttccaatatgcacccccacccacccctgacacacacagcagaaagcaaattcaacattgttggagacatctttggaattgctagttgagtcatttaataactttttctgggtcttcctgcttttaaacaaaccataaatgtagagaaaatcatctagaagcatgctttgaaatttcattagtggagtactaaaagagttctaaaatgagaagacacattggtcactttttaaattacgtagagatttttcagactactaaagacattgttattttaaaaataaataatcactaaacttgtcaacattgtttattaaagccgatgttttagaatgcctaccctagagttgaaggacatcatttattttgctttttggaaaataaaaatgcaaagaaagtagaaaaaaacccaaatcatttcccttatcttgcaaaaattgaactcaaataattgagcatttctgtggcatctagaaaagtatagactaaaatttgccatcacacttcttgtaattggttgaataatggcctccaaagatatccaggtcttcatccttggaacctgtgaatgttattatgtggcaaaagagagtttgtatatgtaattaaagatcttgaggtgagagggtatcctagattatgtgggtggattccaaatataatcacgtgtccttattagagggaggcagaaagagatttgactgtagacagaagaaagaaggtggtatcatgacctcagcagagagagggctctgaagatggtaccagctttaaggtgcagggaggggctgttagccagggaatacaaggaatccagctctagaaggcaaggacactgattctccccctcagagagggccttgtaccttggcctggtgacattaattttgaccttctgggctccggatgtgcaaaagaaaaaaattctgctcttttatgccaccaaatgtgtggtaatatgttacaggggccagccatatcaaccaattaatgcttttcccaatttctaggaaacaggaacttgatgtttgattttaaagttcagtacatgtgttaatggggatgaagtagaatgtaaaggtatgataaaaataataataagaagaacaaaaaaaaacaaattttaggccaggcactgtggctaatacctgtaatcccagcactttgggaggccgaggcgggtggatcacttgatgtcaggagttggaggccagcctggccaacatggtcaaaacccatctctactaaaaatacaacaattagccaggcatggtggtgcatgcctgtagtctcagctacttgggaggctgaggcgggagaatcgcttgaatccaggaggcagaggttgcagtgagccaagatcatgccactgcactccagccggggtgacagagtgagactctgtctaaaaaaaaaacaatcaaccaacaaacaaaaaacaaatttggctgtgcttcttttaggaaaaaagacttaattgcattaaatctcaaatgcatcattagtaaagagcggcaactgagtttcctcggctggcattgtggtggtctagctatactgaagggtctccctgttataagtcaacctaattttttaaatgtgttgctaggcttgcagttcataagggaattcatcctttaaggtcccatatattagtcagctttggctgtgataatgatgtacagcaaaaatctcaaaatctcaatgtctacaacagtaagcatttatttctaatttgcattgcatgttggcagctgttaagctggataaccctgctccaggctccaggtcaggttcaggtctgtttcatggttcttctcattgatacttaaggagcaaagctcatctaggatgtgatgttctcatggtggagggcaggagcacaaaagaggtcccagaatcttgcaaacctcttatgatgtctgttttgaagtggccacactgccatttctgctaagatttcattggccaaagtaggtgcaataacactgggacagggacatttactgggggtgaggaagtaaatatttgccaaatactaatatggtctatcatactcctctattagctaaaaccaaacaatgatgcagtaagcagcaagtaaatgctattaatatatcaatattgcagttgaagggagactaaccctttggctggtggctgaacctgagacttctgcactaaattgagactctcaaatggggctaaagtggccctagagtggtagggtcccctgcttcttagtagaaagaaacacaaatccattttggattcccatagactaagactaaccaaataaaatcgcaaccaaatgaatttccaatcaacacacatggaatgaagttactatgagtaagagtcagcggaaacaatggaagacacaccccaagctttagatatgagaattaacaaaatagaaaataattagttatgaaatgtttaatgaaataaaatttggagacataaaataagaaactcaagaattgagaggctgatttgaaaaagaattaaataaaacttttatttatttataattcattaattaaattttttgagacactcaggctagagggtagtggtgtgatcacagctcagacaacctcaaactcccgggctcaaatgatcctcctgcctcagccttctgagtagctgggactataggcatgcaccaccacacctggctaaaaacctttagatacaattactgagtctaattgttgtattaaaaaaactcaactgatgggccaaacagaagattagactaaactaaatattgatttagcaaagtagactagaggtttgaagaaatcacccagagtgtagcagacagggaaacagaatacgaaaaaggttaagagatacagagaatagaatgagaatgtctaacatataattaattggagccctagaagaacagaatatagacaatggagaaaacagaatatatgaatagattagtagctgagcattttccagaaataagatttaaatgggagatagaaaaaacgcaaagtacattaggcaggatggagaaaaggaaagccacatgtagacaaattacagaaagtttagaacactgaaaacaaaaagcagctaaagataaggcaaatgacttaaaagggacaataattagactaagagcttactgttcatcatcatcaatggaagccagaaatcagagagataacatcttcagagtgctgagaatgaaacaacattatacctgggataagactacccttttatttttttctgaagggttgttctgtccccaagaaccctcccaaaataaactgattataaacctgagacttcagagtaatagggattgggtaaaaccaatcaaggacactaatcacattaagaacatctatttacatccagccatgttccacaacagctttgagtctatttctagtatataatttcaccctctctcatggatgtggatagacatttttggataaacaaaaactgcaagtttattacccatggacctttactaaaggaatttaaaaggatgttcctaggaagaaggaaaatgatcccaaaggaacatctaagaagcaacaaggaatccttagaaaagaaactgcaaaacatattggtaatgctagaagaacttgtataatataataataatatctaatttggtggtttcaaaaaaaagacaggagccaggcatggtggctcacacctgtaatcccaaaattttgggaggctgaggcaggaggatcgcttgaagccaggagtttgagaccagcctggacaacatagcaagaccttgtctctaaaaaatttttcttaaaaataaagaaaaaactaaaaaaaaaaaaaaaaaaaagccagagcaagactggtccttgatcaaaatagttttttaagcttcatgttcagataggggattaagatacgaacttttggtttgttacattaggcattgttaaaaaaaaaatttcaggcatattaaatttaacagattttaattgagcaaagaacagtttgagaatccagcaacattgcgcttccctggaatgagaataggttcagagaccctgatgctgctgtgtggccaaagacggtttatggacagaaaatgggaagtgacttacagaaaacagaagttaggtacagaaatagctgaattggttactgctcagtgtttgccttatttgaacacaatttgaagagttggcctctttgattggccgaaagtcagtgattgatacaagagtaagttacagtctgtttacacatctagttaggttatagctcattatgtatgaagaaacctttaggctgttaaacttaatttaacagcatgcatgtaaaatgtcaagcgtaaccggtaaaagaacagaaatgcagtgattaacatcccaacccatcccaagtgaggaaataaatgcagtaagaaaacaaagaacactatcattactcaatcagacgactaattaaaaggcatgaaaaagtacgtagtaaaaatgtgaaaacaaagccaggtattttagaaatgatgatttttaaaaggtaaatcgctatcagtaataaactaataaactatattttattaattttagagctctagaataaatagcacatagttattcaaaaatgtatttctttaaaagcttagctattgatatgatttggatgtttgttccctccaaatctcttgttgaaatgtgatttgcaatgttggaagtggggcctggtggaaggtgactggatcatgacggcgggtccctcatgaacggcttagcaccatcaccttggtgataagtgagttctagctcagttagttcatgtgagatctggttgtttaaaagtgtgtggcacctcccaacccactcttgctcttgctctcaccatgtgacgtgatggctgcccatcgccttccaccaatgattgtgagcttcctgaggcctccccagaagcaaatgccagcaccatgcttcctgtacagcccacagaaccgtgagcccattaaacctcttttctttataaattacccagcctcaggtgtttcttttctttctttcctttctttcttcctttctttctctttctttcttttttcagggtctggctcttttgcccagactggagtgcagtggtgtgatctcggcacacctcagcctcaacctcccaggctcaagggaccctcctgcctcagctccttgagtagctgagactacaggcgcaagccaccaggcccagcgaattcttgtattttttgtttttagagatgaggtctcactttgttgcccagctggtctcgaactcctggactcaagggatctgtccacttcagcctcccaaagtgttgggattacaggtgtgagccactgtgcttggcctcaggcatttcttcattaatagcattgcaagaatggcctaatgtagctatttttatacaaaaagatgagctatttacaagtcattctttgctacccacctctatatttgtcaaaaatttgaagcataatatagatttcttatatgatcataaacggcttaaatttgttacatttctgtgtgtcaaggaatggtgctgagttccaagatgataccagtttttacaggtttgtggccatcttcgaaatgtctgcttaataggccttctttttaaagaagacaaatcatcactgaaaattgaagagaaaaatcgagtgttatttatatgaaacttaaacatgtgacattatgtattcttcttctttgggtacttcccagatgtgattatgatctacatagttttgctaagacaactcaataatttgtaaagaggcttagcattaaaatgttccctatttgtgattacccattgtactttaaaattgttcctgctaatttttcatttctgatgatccaagtgaagagtatttgccaaacacccacagtatcaaatctaagatgctaaaggcagcctgcaaagggaacaaagggaaacgaattctagaggagactctacaagttaaggttctatgtaattgttgggtagatgcaaaacggactggaggaaacattgcttttgatacacctgctgaatagttccctttaagggttgtcctccctcacccccaaagaaattggattactaggttgggctaggtggctcatgtctgtaatcccagcactttgggaggccgaggcaggtggatcacgaggtcaggagatcgagaccatcctgactaacaaggtgaaaccccgtctctactaaaaatacaaaaaattagccgggcgtggtggcgggcgcctgtagtcccagctgcttgggaggctgaggcaggagaatgccgtgaacccaggaggcggagcttgcagtgagccgagatcacgccactgcactccagcctgggcagcagagcgagactccatctcaaaaaaaaaaaaaaaaaaaaagaaagaaagaaaagaaattggattactaatctgagacttcagagtagatgatgggtaaactgattgatgatgctagtcttctaagtatgtttgtttatattctacctcactccacaaaagatttgagtgtgtttataacatgcaatttcctctaagttgaaaaaaaacgaatgaaaaaacagagtggtggaaaatatataaagaaaaggcatataggctgggctcagtagctcatgcctgtaatcctaacactttgggaggccaaggtgggaggatcacttgaagcctagaattcgagaccagcctgggcaagggagaccccatctctacaaaaaacaaaaaaccttagccggtacaatggtgtgctcctgtagtcccagctacttgggaggctgaggtgggaggatcacttgagtcctggagtttgagggtacagtgtgctgtgatcatgccactgttctccagtctggacaacagagcaagaacttgtctctcggggaaaaggaaaagaaaaagaaaaaaaaaaagaatagtaatataaatctaggccagatgtctctaaacttggcagtggtgcattaggatcacctggggaacttttaaagctcctgatgcccatgtggcaccctgtactaattaaatcataacgcctgggagtgggaggcagagaggagcagtagtaaaaattcccaaatgtttctatgtatagcaaaatttggaaactaagctgatgttctcagccttaaatgcacattagcatcacctgggaggctgttgaaactactgatgtcagaatccattaaatcatagcctctgatgctggttaccgggcacttagtctatttgaaagctccccaggtgattgcaatgtacatgctgagtagagaaccacagcactgggggaaagttggtatatagttacaaaagggattttttttaatgggttcttttatggcttaagaccatgaaactggttctgagcttcctggtggccaaagtagatagaaaaacacagtcggttttaataattttggtcatctgccatgcaaaagcttaccagtttcttgaaagcaaaagagcttttcttcatagatctgaaataaatgtctagtttattagtcttctcacagaggatgttgatgtcatggatcacgattttataaacaccccacaataagtgacatatggcaagtttcatattatagttcctaataaccatccctcagggaaagacaaggacatgaccctgagtgcagggctataggctgttgcggtgggtgtgtgggagtagatgataaaagacaggaagagaaactgccacacccctctacagtttccagataacatagccttacccaaaggcgaagcctggaattgtgtacctccaggatgtggaaggcgtgtcctgtgtaattagaaattataattttctatcagcacattttaagaattatttatttatgtatttatttatttagagacacagggtctttctctgtcatccaggctggagtgcaatggcacgatcatagctcactgtaaccttgaacttctgggctcaagtgaacctctagtcttagcctcctgagtagctaggactatgggcccatgccaccacacctggcaaatttttaatttttttttttttttgtagggacaggggtctctctatattgcccaggctggtctcgaactcctggcctcaaatgatcctcctgcctctgcctcccaaaatgctagcattattattcaattacttttcttcctttataatataaactgtacaaattttacaaaggtttggctagtgagggtaggtagagaagcactgactcccatccatgagggtcacaggctagggcaagggcatctgagaatgcgtgtgtgtgtgtgtgtgtgtgtgtgagagagagagagagaaagacagagtgtgcacgtgtaccttttgtttatcaaaagactttagggttgtttttttttgtttttgttttttttgagacggagtctcgctctgtggtccaggctggagtgcagtggcgcagtctcggctcactgcaacctccgcctcccaggttcaagggatcctcatgcctcagcctccccgagtagctgggattacaggcgcccgccaccacgcctgggtaatttttgtatttttagtagagatggagtttcaccacattggccagctggtcttgaactaccgatcttatgatccgcccgcctcagcctcccaaagtgctgggattacaggtttgagccaccgtgcccggtctaaagactcgaggtttgaaagggttgaaaaacctcagtattgaaagaatggacagaaatctgacttttaaatagtcctccataaatagttctcattgggggttttgtggcctgtaagtactgtggacttgacggctcaagacttctagagaaggcttctgagtaggatgttgactccatggggctaagtcgtcaaaggaaacccattctacggcacaggttttaagccagtcatgctgcaggaaggcaaaggagagcttaaggtagcatgggtgggctcttttgaaaacgaactagcagggcgaacagcagatatttagttatgtagctggcaacgaggaatatgattccttcgggtcacgcgagttctctctgaacttccttgaatgaaaatcctaaatgcatcctggtaatacccaagtaggcactttgacgtttccttttcaaaggcaaatggaatgttctgcgtctgttttctttttgaactcccaactgcacttaacatctaaatttaaggaaaggcttccgaaaaagtcgactgacgaatttctttcacttatttaaagtagtctcttgcagtcctataaatcggaaggattaaatgaactgcttgctagagaaacggtagctgggtggtgggaagaatcctacggtggctaataagacgtctcgatcatttgcatatgcaaaggataaccttaagcttgagtttgatatttcacgttgcggctcacaaatgaactgctttttattcaaagaaccatgctgtctgttttcgcgtgggtgggtgtgtaaccggggcgggcgctatgttggttttgttccctgcaaggttgacacaggcaatggcgacttgcggccacactggggcagcctctcctcggctggcagccgggccgggcggctcgctcccgggagctgacaatgtagccaagtcctgctcgtcggggccgcaaagaatttaaaggggtctagaaacatccatcttttccccttttcacagttaacagcgagctcagggctctcggtaaaaagaccaccgggaggaagaaacgctcagggcgtttttgttattgttcgcaaaatcctctatcgcccccaaacgtccagcccgccccctccctaaagcggagggaaaccgggagaggagggagggtcggcggcgccggccaagcgcgccagtacacgcccctgcggatccgccccgcggccgggtgacccccgccgcgccgcgctggaggccccgggccggggtgggcgtggggctgaactccgccacccccgcagcccgcggcccgctcgccagcccggcctgtgattggcttggggggcgcgtgtgcccgccccggcgaacggggagggtaccctcgcggcgccggtgggaggaggcggaggagggggcggagagagcgggggcccggacggcgctagcgaggaggcgggcgagccgggtccccgggagcgcagaggaggctcggaggggggcggagagcggcggggcgggagggaggcgcgggtcgcggggagggaaagcccggccgggtctgcgccgccgccgcgcgcagtgagaggcgccggggctgccgcccggtgctcggcgcgctctcgggagccgcccgcccgctggtcccgcagccttccgggaggaagcggtgccggcagcgtccagggcgcgctctcgggcaccctcacctgccggcgcccggccgcttacccggcagggcgtgcgcagggtagggtgcgggaccggggggacctggaggcagaggggagaaccggccgtccgcgccgcagcacagccgctgggagcgcctcagaccccgcgcggggcgccggctccatggcgaccgggctcggggagccggtctatggactttccgaagacgaggtgagtggcacccccttcctgctcgggactccccggggagttcctatcccgcgccggcagggggaggggaaaggggccgtccccggggtgctcgtgcccagcgtctgcaggggagccccaaagcgggagcgccccggagcgggatccaggggagcttgggtccttccgcaccccccaccctccgcaagccgagctcattgtttgtaaataaagcggcgcgacgcccttggagctgggggttcactccgcagctcctcgctttcgggaggagagggagggggcatgcgtgcctctcttccctcttcctctccaagcagcgtctcccggggctgttgggcaactttccgcctctcgcccctgcagcccgggagtccatgatgcatgtcacgtctgggtcgcgcggctggagacccgggactgcggagaagccggatcgtttccccctggaactttctctctcatgattgtgtggatcagcaggcgctcagaagcctgtgcgtgcttatcccggcgggaatgggggacacgctgcgtgtgtccctcccctcgttttgcaaagtctacggccaggattgtggatttcggagcctcggtgggggaggtgttcaaggctggtggcaggtgctcctggaaacttggggaggaagcttgcagccctgccattttttcctcccgaggattcaaagcccggcacctccagggtgggtggggagaggaaagcttaattgatctcttttattaataaagcgactgaataagccacgcctcccaggcggtcggtttcactggaaagggctttgtttttaccttcattctctcttccgtgtctcccactccccccttttgaaacaatcctgctaaatcactgcctagtcctctctcgaccagccacgctcggctcttattggtatgttgctctgccaaaaaggggggtgggacgcttgtcgcgggcgcggcgtgacaggcaggctggatggagcaggtaggagtggtttgccatctggcggggtgcgcgctcaggtctggctcccctttcgagaggtgaattttacaacccaagaagcattactcagcagggaggtatttcctatcctggttgtgcatttcatgaaaagttgatgcctggaaattcaggcgttctcgatttctctttcttcccctccctcctttcttttcagaggttccctctttctctcgtgttgggggtggggttggaagaaaggctattatctgagacaggctcgcgttatggctccgctttctgcggctctcctaccctggcatggtgtgtgtgtgtgcctgtgtgctacgtaagtgtggaatgaaaggtattttggggtgggaagggtgtttagggtatgaatttttttcttagcggtgctaggcaaagcttgatgtatttatttgatcaaagaatgatcacagtgcaaataatgtgtgatttgtgtgtttattttgcctcgctgtgcttttgtaaaataatttcccgttttgtgtaactacctggggataggtgacagtagcattgtttcattgacccggggggcttctcctctccctcctggcttctctctttgaggagctttcccttgcatcctctacttctccatttaattagtggcagtagagggcaggccctgagttgcagagacgcagacattcctaaacaaaggggctgcttgggttgacgtattgtggggggtgggggtgaggacagctgcatttcatcctaggttcttttaaaaaatgttttaataacatgattatttgtaaaaactcccccgaaaaaacgattttaagagtgttttgggaagtgcagctggataaatgaaacacgttaatgtcactgttgtttgtgctttatttacattggcagtgagtgtcagaatctacctagagcacatcttgccacttttgtccacaggagtcactactaatcatcataactgatgtctagtgtgaaagtgaagcttggaatgtaaacagagtccgagtgtgtgttggcatgtgactggattcactcctgcatgttgctagaagggaatttggggctgtataggaaatagcaagaggtgatgaagacaccttttattatctatttattgccatgtcgctggtagtatttagttccacacacattgtatttcacaagatgagtctcagccgtcttcctttttcaactttctcctaccagtgaaaaaataagccagggcagttctgatgacttcacatttcattggtatttgtttttcatgggcagtttcatgctgtcacgttgcccttcagagaatcagggaatgccttcgtagaatattaacgacaaattgttgaatttgcacagcttgttttgtctccctgaattagtatgtgtaagaaaaaccaatggaagattttagcaggctctgaaagtagaatgcccgctgaagcaaacggcagggttgttcttccaaggcgtattaaatatgggtacacttagtttgcagacttggtgtgctgcagaatatcacatatgaagatattttgaccgctatttagaagagtgacctcataaatcttttagcaaagtagacacacatacctaccacatttcttaaaagtagattcgtattttgatttgagattgttgaaaagcatggtatgtttggagtgcacttagttatgtcccatctcataaagactgttgagctctctgcactgctgatgatgaagcattgcatgaacccagaaaacggggatgccaaagcacagggcttaggtgctgttccttgcgtcatcagcagaggtctgtccactttgtagaaggtaaggggttgagatgtgggctttgcttgtgtgaatgtatgtgctgtttaattttttctgtgtgtttcgggcggaggtttctctggtgagttataattcatatttaccctgatttaagtcatgtcactttaggtagccagattcaaaaccatcagatgaaggacttttggtgttagagggattagcagtttaacaaaacttctgattcatggcccaagatcagatttggtttggaatcagaacactttggactagtttctgcatctggcttgagtccttgtggatttcttgttttatttctttatttttggcaatctgtagtgcattttggcatagtttacttatgaatgttaccgctaactttctgaaatcttttattccattttagaaaggtatcatttattgaaaagatttttctactgaacaaaatactgggattgaatggcagcttcttatcacattagatatgacattaagtaatttcgttagtagttaaaatgaagcaaatggcatagaaatgaaggccaggctgacataggataaatggcaccttctctccttatcctgtacaaacacggatagttggctacttttgaatgcctcttctataccaatggtaaaaatccggcttaattggggccacattctagcctagtcacaatcagtggcttgcattatgtcctttgagatgtggcagatctgcttataggtgccagtcaccacggctccctgctggcttgggggtctttctactcatttacatataattatctacttcttaatcaaccattaaggttaacttttggcatggatcctgtatgcttttcagtttaagatgctgtcacttttaagatgcgccatgagagcaaagtgctaagccttgtgcacatactatgtcatttagttctcatgagaactgtgtgaggtaggctgtgatttacagatgaggaatgaaagctcaaagaggttacgtgacctgcataaggacacaaaacaagttaagttatggagccagctattttgaatagaaaggcctagtttttaacatgctgaatatcctccccttctgacaaatgccttgaaaggtcttactatctagattatttaagataatgtaagagaaataaacaccactggttgcaaactgatggctgctgggcccgatttgaccaggaaccctgcttaatgtggtctctagagtgttttaaagcttggaaatttcatgaaaatggtaaaaatctggcttaattggggccacattctaacctagttacagtcagtggctggcattatgtcctttgagatgtggcagctagttgtgctatggttgcagtcaccactactttctgttgtcttaggggtctttctacttgtttacatataattatccacttcataacaaacctttaaggctaacctttggcgtggatgccatatttctttcactttagtgtgctgtcacttttaagatatgccattatttcatgtaccacgaagaaaaaattgctgtcaagttatgacatactgtccatcttatgaagcatccttatttcagagaagttgaaatatgagaaaaaggatattttagaattgatgaattacagtgactagaaacctgggaaaactccatgccatcagtttcaatatccccaatcattcagtacttttaagtcaacgagtagtcagatttctgcttttctgtgtttgaggaaagtgctagaaaaagagaagtgctcttaaataggcattagcacagaaggaactgggggcctagatcatagccaactggatggccgtctgtaagtgattaagaatagttgttagtttttaaaaagtggcctgtgtgtattttcaagagattacttgggaaaccctatgtgccatctttgcagctgtgcaaaacggtgaggacaagattgctttcaaaaattgtggtttagattttgcttggatctcaaggtgaatgctgacaggccgttttctgaagagagagaaggcttgcccagtcatgccaagtccaagtgcctgtgtcgggcctagatgctggatggtagactgtatacccaggacatataggtaatgtttgagaaacaaatgttaaaaggacctagttttcatggtgacatttaaaatcagtttttaaaattcatgaatataacatgttgttttaaaatttgattatagggaccgggtgcagtgatcactcctgtaatcctagcattttgggaggccgaggcaggagaatcacttgagttcaggagtttgaggccaggctgggcaacgtggtgaaaccccgtctctacaaaaaatagaaaagttagccaaacatggcggcacgtgcctgtagtcccagctacttgggaggctgaggtggaaggatcacttaaacctggaggcagaggttgcagtgagccaagatcatgccactgcactctagcctgggcgacagagtgagaccctgtctccaaaaaaaaaaaaaaaaaaaaaaagactaatgaatagaatttattttcttcaatgatgtagtgtctgtggaatttgtagacattgacatttgaattttcattatatttagttttattaaatcagaatgttatgattgtttatttcattattgaacatcagtttccttaatttaaggaataaaaataattttgctcaggccagacatagtggctcacatctgtaatcccagcacgttggaggccaaggctggtggatcacttgaggtcaggagtttgagaccagcccagccaacatggtgaaaccctgtctctacaaaataaataaataaataaatgaaaaaaaaatcagctgggtgtggtggtggacacctgtaatcccagctactctggaggctgaggcaggagaatagcttgaaccctgaaggcagagattgcagtgagccgagatcgcaccactgcactccagactgggtgacagagtgagactctgtcacaataataacaggctggggcagtggctcatgcccgtaatcccagcactttgggaggccgaggctggaggatcacctgaggtcaggagtttgagaccagcctggccaacatggtgaaactccgtctttactaaaaatacaaaaattagctgggcttggtggcaggcaactgtaatcccagttactcgggaggctgaggcaggagaattgcttgaacctgggaggcagaggttgcagtgagacaagttcgggccattgtgctccagcctgggcaacaagagcaaaactaaaaataaaaaataaaaaaagaatagtaatagttttgcttaaagggtgaggacagtgacaaatggtgatcctcagatgactgtagtttctttaccattacagaatgcaattcaaatgaaaaccattgcatggtactcaggcatttcttcaatgcagtgtgtgcccacatcaccaggaagcttacttgggaaagtttgttttgggattctggagtacctcaatatatctggtatattttcccaagaaaagtgaataatcttggggggccgaggtggacagattgcttgagcccaggagtttgacaccagcctgggcaatgtggtgaaaccccacctctacaaaaaatacaaaaacttagttgcgtgttgtggcacgcacctgtggtcctggctgctggggaggctgaggtgggaggatggcttgagcctgggaggttgaggctgcagtgagccatgatcatgccactgcactccagcctgggtgacagagcaagacactgtctcagaaaacaaaggcaaacaaacaaagatcaccccaaagaagaactcccaacatattaaaagtcattgagttttgtacccttcaaatggatgaattgtgttgtgtatgaattacatctgaataaaactgtttaaaaatattaagaatgattgagtgtgacattattgcagcagtacattggagtttctgctaaattacttttgcattcatttcaaaaggaagcaactatgcccattgctaatttaataacctgtttgcttgtgcggtgtttaaaatggcatcatgaaaacatggcaatgtgtgatagattaagagccaattaaattttttattttgagttacaagatctgcattaaacagattttattgttgcccttgaatttccagtcttagatgagtagcagcagtgaaaaaaagagatcctaacttaagagttttcaagctttttgatgttgcaggtatttgaataagtgggtctgtcttactgaaatatttgttaattagcgataaagcaaactatatgttgatcttttggtagtccatgctaaggaggattagaataatatataaataatataatggtaataagtatcagggcaggaggattaaagaagggtggaagaagtgtgacaaaatgttactttctgtttttacattgtttctcttccaggtcacaactgtatttcaaatgtatttcattttcagactataggtggcaatgtttgtgctgttcactgtttaatgttactgttggctcgggtgttgcttgttgctggaatatggaaatgatagcataatttagagttgagaataaaaaaaactagatttagaaaactagaaactagatttagatttagtagagactttctaaatagtcctagttctgctgtgtggacccttctgtaactttctgttactctgagaaggagctgataattatcacaactactggtgtttgattagcagagacattcttgattcctgatgcaagaccgtggctgaagttgtagcagggcgtttggtggttggcgatgtaaagatctgggcctcttgtttcatgaataatagaatctcactatgattgtaatattttgttttgaactggagtgctgattattgtaatccctttaggtgagaaaagccttattatataagtgtatctggggtaactagcttaaatttgacactccagtcaactttttgtccctgacttcagtcctgcattgattcaaaacgcaccaagttaaatgtcaaggctctcagattcccttgctgtcatcaaattcagtgtttggtgacttcttggcaggcagacatctaccaagagattttgtattctttttatacctcctattcaccaaaagaaaagggccattcaaaagtgagtttttctttttttttttttttaagtttaaaaagctatgatgtggccacccatggtggctcatgcctataatcctagcactttgggaggccagggcaggcagatcacttcaggccaggagttcaagaccagcctgaccaacatggcaaaaccccgtttctactaaaaatacaaaaattagctgggcgtcgtggcgtgcccctgtaatcccagctacttgggaggctgaagcaggagaatcgcttgaacctgggagatggaggttgtggtgagctgagattgcaactctgcactccaccctgggtgacagagtgagactttgtctcaaaaaaaagctgtgatgtgaaacctgttctgtgaaggtggaacttggaaaggcttgtaaggatggtggtcccatgaagaggatgaacaaaccaagggaactgtcctcttgctggtttgggtgatgtcccatcacctgtcactttgtttgtttgggctgcagtggaccaatggtttcccaggcacactgaagtgacatgtagatggattgcttgagtggctccggcatgtttccatctcctgtctaccaggcagagaccgtgttccctgttttgaggggatccagaagtgcagtgacaagggcctgatttgcatctccagctcctggtcttgcctgtgttaacaattttttttttttctttccagatggagtctcactctgtcgcccaggctggagtgcagtggtgcaatctcggctcactgcaagctctgcctcccgggttcacgccattcgcctgcctcagcctcccaagtagctgggactacaggtgcccaccaccacgcccggctaatttttttgtatttttagtagagacggggtttcaccatgttaggcaggatggtctcgaactcctgaccttgtgatccacctgcctcggcctcccaaagtgctgggattacaggcatgagccaccgtgcccggccaacaatttttacattctaattaatttccagtttccaacctgactcaaggtttagctcttcgtctcttgggtgcagttttggatcatgtcttataatgtatatttaaaagtgtgttgtaaagctggaattcccattgtgggtaaatgctgagattgttgtaatactgagaagtgcacttgggaaccatggccaacactgccctagctgaccggaggttgcactgagttgtcccctttgaacatctgttatgaatgaatgttggaaaatgcaaagccaatcatttcttttacctgacctatgtgatgttaagttttagttttatgttttggcaagtgagtgttggatgtcactaatgtgaggaggccggtgagggcagactttgggtcagaggtaatgtaggagatgaagaccctttctattaatttttcttgtttaattgaagatgttcgtgttgaatgggttttatttacatgtataagttctttttttcttaatgctggaagttactttggtttttcagaaaatgcaagtaaccctaatctatttagagaattactttgcttagtaagcactcagtactatttagtaatggggaaaaaatgtgtttgtgtcccacagcgtgacaggctccacaaacttacttacgaatctcctaactaccctgagaacctgaagaatgggactttgtggagaatcttctgctttctttgctagtctctatttttccttctcagttattaagtgagttgtctttgggtgtcctcatcatgctgacttcatcttgcccagtttgttttgggtagaggaaggagtgcaaggtttaaaggaaaagcaaagcctgtacaacatggtgagaccccatgcctgtggtcccagctacttgagaggcccaggtggaaagataatttgagcaccggggttcaggaatgcgctgagtaatgattgcaccaccgcactcgagtctgggcaacagaatgagacctcatttcaaaagaaaaagaaaaagcaagactgaatcatttcactttgtattctcctccttgctctcattccttttgtgcttcatgcattgtgtgtgacaattggatgcagccgtaattattgtcagtaacttggtttttaagcttcagactgtatttcctcctcacttgttaacaccagaagataaatgaatgtggctcttggattgaactacatctacagggagctgaacttcccatgttgacgttgaattctagagtatgcttatgctgattcttgagaaattggtatgtgccgtgcctttggaattgataccttaattttcagtgaatattattggtattattattaaagagaacactttaagccaggagtaagagcttttcctccttttgagaagtgaggtacagaagagtatactgcagctgtgggagtgatgggtggggtggggcagtgttgaagaatatttaataccacgaagatgtcaccagtataatattaaatagaaaaagtaggttataagacagtggatccagtagaatcctattgtggttaagtgtttatatgtagagaaaatgactaggggctaggcacagtggctcacgcctgtaatctgaaccactttgggagatagaggtgggaggatcacttgaacccaggagttcaagaccagcctgggcaacatagtgagactctgtctctataaaacaagaaaaaagaaaaactaactagggatatattccagcatgttagtggaggttatctttgagcaaaggggattataggtaattttttattgtcttgtgttttgcttacatgtgttttctatatttctacaataaacctttttttcttaatataaaagtaagtttaaaagtgagtttaaaaatccctgaaaggcatgtacttcaagcttcaagtgaaagttatagtacttgttcagcacaaatactgatatagtgtttgttcagtggaacacttatttagggtctgccttgtgttttgtgtctaaggattaccaggtcattttcatattaggagctcaccactacgttgggagttggagagatagagcaaggactattttaaggaaaaaatgactggtaaattgtatttctttttccccacttgcagtttgcaaaatagatgtttcatttctctccactgtggacacttaaagtttgaatttccatccttctgtgcactccagttgcgtgaaagtaatttacattgctagtagtggtttgggttctctgaaattttttgtgtgtgctatggaaattgtctcctgtgatcagactcaaatccatttctccttattattgttttcttaggttttgagttagagaccttttcatgaccgtataaggtgttgaataggtttagatatcaaagtgatagctatgcatagctatactcacctgtgagcggtcagctcttcagtgtttctttcaactgacttgtaatatccagccactgttgggtgtgacctaaagtgtatctcttcccaaacagaagggaggagttgacaaacaccatgttacttttaatcagagacttgtccttgtcccccttcccccagccttttaataattctgaattcatgttgcagtcgatatgtgtttaaagtgttggtaggtttcttgtactcacaccatcctcctccactcctctcacccccaaaaagtgacagctgacagttgatggcatcttagaattgtgaggcttgagttggtctgtctcaattcgtgttttatggtggcccataaattgtgaaagataattgatagttgtcatgggaactagttatgttgttcagctatgatgtctcaattaggaaatgttcacctagacagtagggaaatgggccagctcagggatgtcttcaggaaccaggttcattgttttttctgctttcccttctacagcctggctctttccagggcttcttggtcctaggctggctgccactgacagagctatgcctttttttatttttttactttttttcaagacagtctcactctgtagcccaagcaagagtgcagtgacaccatcttggttcactgcaacctccacctcctgggtttaagcgattctcctgccccatcctcccgagtagctgggactacaggcatgtaccaccacacccagctaatttttgtatttttaatggagatggggtttcaccatgttggccaggctggtcttgagctcctgacctcaagtgatccacctgcctcggcctaccaaagtgctgggattacaggtgtgagccaccatgcccagccagagctatgccctcttttttttttttttttgtttgtttgtttataactgtgtacttgtaaaggaaagagaacggcctcctgtgccttaaatcttctgttgtgtctcagggcccacagaggctgagatctgttcatcctgcaaccagtcaccgtggcaaggaggagatagaattacctttttttcttaccttttgagccaggggtaaagtcaggcacggtgaccctgcattccacaccttggataatccatccaccttcagaaatgcccctggcttcgtgaaatgcacatgctccctttctccagggaggtgacccgaatatgcagctaagtattgcaaggatttctgggtaatattacacctgaaaggaggttttttttttttttaattatctggtgatttatgactaaataggctatgtctctcaaaacattgaacctgcaatgggcaagaaagaacaggatgactacaatgaaccttctatttggaaaaggggaaaataagacactcacagtggggtagctggctgaacaggaacagctgggagcgtttgctttggtcagccggtctggcagcttgcctctgctgaagtccgtccagggtgagaatctcgcttggtcattgtcctctgcagctgcacctggatggggtaggcactggcaaagctccttttcttgggtgctgcttggcattagtctggggcttcaggattggttgtcttggggttgaatagccacaggcttgttccagccttactgagaatgtctttggcaaaactgctcccaggaaaactcaggctctgagttttgtgtctagtcaattccatgggctggtaatggcagccagtgatctcacctagatgaggtctgtggttctgggaattcctgggtcttaacagtaagtcccacagccctgctaatccccaccacatctgccttgaggcaattttaaaatagcctagaatgaagaggcacacagttttgggtctaacagacaacaggggcagtttaacccactctgcttttgctctctggtgtatcaagaatgagcaacttccccacactgggattgtgggactctgagtacccacttcccttcactcagccattccaatttcttaaagcaatttttaaaaaatggtggtaaggccggccgcggtggctcacgcctgtaatcccagcactttgggaggctgaggcaggtggatcacgaggtcaggaggtagagaccatcctggccaatatggtgaaaccccgtctctactaaaaatacaaaaattagctgggtgtggtggcacgcacctgtaatcccagcctctcgggaggctgaggcaggagaatcgcttgaacctgagaggcggagattgcagtgagccaagatggtgccactgcactctagcctggcgacagagcgagactccatctcaaaaaggtggtaaaatacacatgacaaaatggactctcttagccacattaaagtgtatggtttggtggcattacatgcatgcacactgttggcagccatcacccctgtctagccatggaactctttcatcttgcaaaactggaaatgccttactcgtgaaccagtacctccccattcccagccattccagtttcttgtagcgcatcttctctttgatacaaaatctttgatagggttttgattgcaggcaacagcaattgaatctgatgaattcaacagagaaagaattaactgaaggaatttggggtagcactggagtacttgtcacactggagagacaggcctggacaggggtcagggaccaatgaagcctgggcatccagaatcacagctgttagtgtgttttattatttaagagtgagctcagaggtcactgttcaaagctgggcactctgtctccaactatccctcttcacatcccagactcaatagcacctttctgcatagttacttctactgaatacttcactgacagcaatgaaggattgttggtttatgtgtctgtctcgtatagattaggcacctcttcagagccacagccacatcccaatgatttatctccagtcccaagcaccgaatcagaccccttgaccgtttactccattcaagtgatgatctcaggttagataatcatgaggtcagttggtcaaagcaaaaacatctttttaaatgtctttttgaattctaatttgtttatgcaatatagattactcctcctattttcttcttctttcttttttttccttaagagatgggatctcagtatgttggccaggctggcctctaactcctgggctcagcggtttctcccaccttggtttcctaaagttcagggatgacacgtgtgagccaccgtgctcagcccctcctcctattttctagtctgtgtcattactgagaattttactctttattctctttcctcaaattctaagtgaaaagacctctcctctctaggccccaagaaaggcaaatgtgttccacggaagaaggttgcagacccatgtttgattgctttataccatatttcccccccagaggctcttaaaagggcaaagaaggtgttgaaactgccactgtcaataccagagcatctgcttgaaaccaatgtttcttttgtgactccaggatccatgctgcctggctaagaagggcagtgtcctccttgcccaggtgttaaaccacaacagacctagaaaactgagatgtcactcctcccctggagtgacagcagtgttaggaagtttggaatctgccaacccacctcatcctgtccatgaagttgtcacttggctaggtgttgatgtaaatgtgctacagaaacaaactcacctcttgtgggacatggtgactctggttagtaacaatgtattcttcaaaattgccaagacagtagattttaaatgttcttcgtatgcaaacttggtaagtatgtggggtaatgcataggttaactagcttgaattaaccattccgcagtgtgtatgtatttcgaaataacatgtacatgacaaacagatacaattttcatcaattaaaataaacatttagaaaaataacataaatcctcacaatagccctttgaggtaggtgctgtcattttataggtggggaaactgaggttcaaggaggttaaataacttgcccagggtcacagaactacttagtaagtggctgagccaggacttgaacaagcagtccggttgtagacacccggagtggaaccatcacgctgtggtgtgtccgggagtgcttcaagcaggggttggttgggggtggggttggggtggggaaggcacagctgaggcctgagtggccagactgtaaaagccaaaggaagaagtggctggatgtgaacagctttgtggacctcatcaaggagctgggactatattgtttgaggcaccttgagaaacctgttgagatctgggcttttcttattagtaagtatgttgcccagactggtctcgaacccctggcctcaggtaatcctcccatctcagccttctgagtcgctgggattacaggtgcaagtcgttgggcccggcaatctgggcttttctaaagctcaccatgcagctttggggagattggatttgagttggacaaccctaggcagttgcagagctgtccaggcagaaatggtgatgacggtgaaaatgagccaggggataaggcaggaggtatttaggaggcagattccattggatttggtcactgattgattaggtacaaaaaaagggaggtgtctagaataatccctaggtttcttcagaggactaggtagatgggaggaggggaagaagcctatctctattaaatacttagtacagtggctctaaactggggcctgtcttgcacccttccttctcccctaggggacatttggcaatgcctggagacttttttttgagacggagttttgctcttgttgcgcaggctggagtgcaatggcgtgatctcagctcactacaacctccgcctcctgggttcaagcgattctcctgcctcagcctcacgagtagctggggttacaggtgcctgccaccacacccagctaattgttgtattttttagtagaaatggggtttcaccatgttggtcaggctggtctcaaactcctgacctcaagtgatgtaccggtctcggcctcccaaagtgctgggattacaggcgtgagccactgtgcccggccgcctggagacatttttgattgtcacagcttaggagatgcctctgacatctagaaggtggaggccagagatgcagcagaacatcttacacggcacagtacagctcccacaacgatcatctcgccccaaatgctgccgaggttgagaaaccctgctgtagtgtagtatcagttttacgtggttatctaattggatccgtgagccagtcatgttagatcataaatatgatttttcctgtttttcagataaaaaactgaggcatagacaggatgggtcacttggccaaagctctgcagctagtaagtgttagagccagaatttgaacgcaagtcttccagatgtcagaatctactccttctgcttaccctgctgcttcatatctcacagtgatgccaaggaagatgcacattggactgtgggttgttttttttttttttctttctgtcatggtggctccagactagaggaggcaggaaggaaggtggttatttatagtcagctgtgcataggatcgatttttttcaatcctgaaggacttgcagcaggtagttcaaagaaacctcctttagacgttgactttcccttgcagttgtaaatatgggaacatttaccatcttttgctttaaaatatactgttataattaaggtaaaatgtaaaacttataacttaaaaactttactccctgtgcatatgaactatggcaagcttctcaaattaattactatccctttgggataaattaaaatattttgatttgctagaggtaaggagcccttttgagaattagtttgttttagttgagaatgattagagggctagaatgatatatagctctaaataggaaggtttctgattcttttggctactctccacttttactggttattttccagttctgggaagattctgcatgtatgtagcagcctcccttggctatccatggtattagagctctagggacagagttctcctagttgaactcttcataatatctcattattggtattttcaaagttatatgtgtattttaagatagtctttggatgatgttccaaagaaggctgctttgttgagattgagatagttgttttgcagttgtgatttctctttgtaaaaagaagtctttgtgtcggtcccaggtcttattttttgcttgatcacccagtacgtgggtgcacttgggctgttgggaccatctggtgagtgtgaggtctctgtacttcacctgtggagtctgttgtcctgaaaggtgccggctcaggtggtggtgctttgaggggagcttgtttgctgcaccttccagtctgctagaaaatagatgcttagaggggcatttcggggtggaatctgatcatggagtttggtgagcaaacagggcctcaagttttatgttgtgagaaataaatactgagtttatgttttaattatggcacagattaatacaaaatctggtgaaaaatggagaaaaggagagcttaaaacttagctgtttgttgctgtcatctaaatgtagttggtagccagcctagatgggaccacagcatggcactaaagcgcggctgctgcttttcagatcccatgttcatattcgcatgtgtggagcatgaaagtaccaatagaaaattttgacaaagaaattgaagggttgggccagggacggtggctcacgcctataatcccagcactttgagaggctgaggcaggcagatcacgaggtcaggaaattgagaccatcttggctaacacggtgaaaccccgtctctgctaaaaatataaaaaattagccgggccttgtgacaggcgcctgtagtcccagctactcgggagtctgaggcaggaaaatggcatgaacccgggaggcagagcttgcagttagccgagattgtgccactgcactccagcctgggcgacagagcgaaactccatctcaaaaaaaaaaaaaaaaagaaatcgaagggtcgataatttcatttatttgttcttttttttttttttttttttttttgagacagtatctcactctgttgcccaggctggagtgcagtggcgttatcacggttcactgtagccttgacctccgaagtccacacgatcctcctaccacagcctcccaagcagctgggactacaggcactcgccaccatgcctggctaattttttatttttatttttattttttgtagagacaagttcgtgctgtgttgcccaggctggtctcgaactcctgggctcaggcagtcatcctgcctcagcttcccaaattgctggatttattgtcatgagccaccacacctggccagggtcagtaagttaaaagataccttctaaactcagcccaatattgaagagtaaacataaaaatacatgttttgtctattatactattactgttactcaatgcttaactaattgtgcttatgtttttttctttgccaaaatttctcttcaaggagcaagtttttctaatattgcttttcttgggaagaacaattagtcacgagatagtacagcttttttttttttttgagacagattctcactctgtcatccaggctggagtgcagtggtgcgatctcggctcactgtaacctccacctgccgggttcaagtgattctcctgcctcagcctcccgagtagctgggactacaggcactcgccaccatgcccggctaatttttgtattttttgtagagacggggtttcaccatattgtctcgaactcctgaccttgtgatccacccgcctcggcctcccaaagtgctgggattacaggcgtgagccactgtgcccagccgtagtgcagtatttttaagcttcggtaaggtagaacccctttagagaaaaaacatcagtgagaagccatgttgccttatttttactataatgtttctttttttttttttttttttttttttttttttttgagacggagtcttgttctgttgcccaggctggagtgcagtggcgtgatctcggctcactgcaagctccgccttccgggttcatgccattctcctgcctcagcctctcaagtagctgggactacaggcacccgccaccacgcccggctaactttttatatttttagtagagacggggtttcaccgtgttagccaggatggtcttgatctcctgacttcgtgatctgcccgtctcggcttcccaaagtgctgggattacaggcgtgagccaccgcgcctgacccaatgtttcttaaaatacatccaaacataaaaagaacaaggatgtttatagctggtatatcaccatagccatcactataacaccgtaacaaacatgcaaatttgttacaaatctaattctcaaatgaataccattcaaattaatagcatgattttaatgtgacaggtgatgctattttattaaaactctatcatctgtgctcaggaagtcatggctgctagggtaagttttcctttcctaaccaattatgtgccagttggtggtaacataacaccgttttcctttgtttcctttattcaaacttctcttgtactatgtactagagcatgaaaacgtctttgacctacagttatgttagctggagacacagcagaactactgttgtcatcttgatcctgaatacaagggccgattgaagccccagaaatcatggggaagtactcgtttacataaagtggtcatgtagataatctaaaatatgcccgttagtgtattaagatcataactgcctaaagcttcctgtgccaggagtggtcttagctctcaaagaagtcatagtctggccaggcgtgatgactcatccctctcatctcagcactttgggaggcgaaaggattgcgtgaggccaggagtttgagaccagcccgggcaacatagcttgatcccgtttcttaaaaaatggaagtgatatccaggtggggaaaccttcctgctgtagtggagcctcttgagatggcacacgtattttgctcacaggtgctatcaatatatagctctggttcttcagaatataaataactatcacctgaccccaataccttatctatattgagattgttcattagatccaaaacatcttgtgcatttcttgctttttagtcatgcacagaccttgtctttactttcaaagacagtttggtactgaaaattgctctggtaaattaacacaatttatttaatccctgctctttccaatctttagcaacgtttttttcattgtcaccatcagatgaccttgctgagcttccaagtggcaattgcttttgttgtattgtttaaaggcaaacaaaaatcaattattattggctctagagtgcctggcgaggtggagctcagttctttgtgcattgcgcactatgctgctggtgtctcagctgccatgcttatggttgcattactttcctgtctagctttggtattcttgcctttaaaaatttctttttccatttgcttttcttagccagtgatgacagtaaaataaggaacgacctatttattgttttaagagatacgctggatggtgcccaggcagatgagcattgccattcaaggtggcttcttggtagactgcatttactcttaatcgggtgcctgtgggtcagtgcatttcttggtcatccttactctgtcaaagctgccttgttagccaggttactagccatactagtctcattaccttacgataacacctcattcaaatggccttaacgaagttgaacacttatcttagtcactatggttggctttgaaccttttctagaagttaagtttattccctgggaaaaaacgtgtttgccaccacacagagtgctgggtgtactgggaacccggcttcaaaggcaactactccagtagggaaggttgaggagggtattgaatgatagctcactgcttaaataagtgtttagagtcccaaggtatatgtaatggcatatgaaatgcctagtgtttaaagaatattcagaaataatcagtcatactctttaatattcatatctcatagagttagcatcaggaaggaaacttggtagattaaataaaatagcagaaattactgctggatttttgtacagtagaaatgtatgcacatttttctcccctagtagtcacttaagttgcatatccatttcctgttacatctcatgacatgttttgggtaaaccgtttttggaagcgtccatttgtgtagaagttaggtggttctgagtttaactttgtacacatttctaggcacaaggaaattaaataactggctgagtgagagtgatctcgttgaatgctgaggcttgtttgggaattgggtttattttggtgaaatgtaaatttagatccactctgtattagtttttttttttttttttttttttaacggagtctctctctttcacccaggctgaagtgcagtggcatgatctcagcttactgccaccatgccaggctaacttttgtatttttagtagagacggggtttcaaccatgttggccaggctggtcttgaacgcctgacctcgtgttccactcaccttggcctcccaaactgctaggattacaagcatgagccatcgcgcccggccaagtccgtttttacactcctataacgacatacatgagactgcgtaatttataaagaaaagaggtttaattggctcacgattctgcaggttgtacaggcttctgcttctggggaggcctcaggaaacttacagtcataagggaaggtgaagaggaagcaagcatgtcttacatggaagaatcaggaggaagaggggtggggtgccacatatttttaaataaccaagcacagactcactatcacgagagcaacactgaggggcaaaatccactcccatcatctcatctccttgtaccaggcccctcctacaacactggggattgcaattccacatgagatttgagttgggacacaaatctaaaccatataaccctcatacacatgtattgtaattcagaatttgtcattttaaaaaaaaatttttaagattagcttatcaatttaaatgtttccagccctgaactctcaaagtcaactttaatgagttttgatttttgccgagaaagatcaacagcagaagaaagagaagtataacaaaacttagctccacaggagcaaactggagaattggagtactggtttatgattttggtcagttaagcagaatgcagtcctagtttaaacaagactggataaaagtccaaattcaaataccattcttacaagtgtttgaatttaattttgtcagtgtacatacatatatctagtaccatagtgatctcaggctttgaagaatgaaaagcaaaagaaatgatttagagtcctggtccaaccactcagctatctgatatccttttgctattttcgtttaaggggttatcagggaatgagctaatttgacattttctgcttaaagcaatggttggggctgggttggggtggagagagctgctctgaggaggtggtgtggggggcctgcgaggacacacttgggttacctggtacatctgcagttcccatggaattgggtctcaaaactgagaaatggaagtgtgagctaggaagaggagtagcttaatggggactttgccacacttttagtgctcctgtagctgcacacatgttgttctttgtaatgtatgatttgtgtcccagtggaacacttgaggagtgggagctggagaaaggaatgttgtacagtgttgtgcagatgtgggtgagatgaggtgatctgggaagctggcagtcttagttggcccaggaatgccaggacctgagatgacagctgctggtggcagcggggaatgcaggtgtatctgtgtcgaggttgggaattggactttgaagggctgggacttccagaaggtaaaatgggattgcactgtttgggagaaggggtacagatttttttgtttgcttttgagataaggtctccctctgtcacccaggctggagtgcagctgtgtgatcatagctcattgcagcctcaacctcctaggctcaagcaatcctccttcctcagcctcctgagtagctgggactacagacatgtgccactacacccagtgaatttttttttcttaaagatgaggtattgctatgttgcccagactgatcttgaactcctagaattctttttttttttttttttgttttgttttgagacggagtctcgctctgttgcccaggctggagtgcagtggcatgatcttggctcattgcaaactccgcctcccaggttcaccccattctcctgcctcagcctcctgagcagctgagactacaggcgcctgccaccacgcctgactaattttttgtatttttagtagagacggggtttcaccatgttagccaggatggtcttgatctcctgaccttgtgatccacctgcctcggcctcccaaagtgctgggattacaggcatgagccaccgctcacagccgaactcctagaattcttaaacattaaggacagaaacatctctgttcttaatcatgatttgcttttagtctcagcagatggaaaaatgatttacttgcaaagtgagagagctagatgaggaaggaaagaatatgattttgtaccactcagagaaaaatgtgagcatttctctactgtcttgggttggttattttccgttgattcaaaattgctctgcaggagacataggagaggcttgagagatgtcagtgggtggccatggctcagccttgatcctgagtgggtgggaatactctgttaatggggcaaagtggaccctccaggtccttcatgctccttttggaaagaagcgttcctggccagacacagtggcttacgcctgtaatcccagcactttgggaggctgaggcaggcagatcatttgaggtcaggagttcaagatcagcctggccaacatggcaaaaccccgtctctactaaaaatataaaaattagctgggtgtgatgatgtgcacctgtagtcccagctacttcagagctgaggcacaagaatcgcttgaacctgggaggtggaggttgcagtgagccaagatcgtacccctgtgctccagcctgtgtgatagagtgagaatctgtctccaaaaaaaaaaaaaaaaaaaaaaataggaaagaaaatatatgttcccctgtggttccctgttataccctcttctcttgaatagtttatcagaagggacaaccagctcctcatgcccttcctcagcaagtgtcaacagtgtgggagtgcagttgataaagcttgattttcacaactctgcaagtagctgagctccaccagtgttagaactgaaattgaggttatctcaccaggaaccaactttcagatgttgaagccagtagaaatttagtaatgtgggaaactgataactaaaagtattccaggttctaattattttgtcagctcagttttaggaagcagtcctagggattcccctggaagaaagtttggctggatagagggcagtgattgtgaattttctagatcttttgtggactgcttctgttgttaaaaaagcagcagtctctcagcacacgaatgggaagtgttaatgctgtaactgagtaacactgatactgagtttaaaataatggtaaatatcccactgaaatttcacccccagtacagattagggccttggaatgctggatagtggattaaggacatctgaaaatctacttcataaaagcagtgagaacattggcaaaacctattaatttcaagtttttcagaaccatggaaattagttaaagatttctagcaatctgaggaatgattgttcaagaaaacactgggatctcagtaggaacagtgaaccttgtgttttaacctgctgcaatcccattcccggcccctgaccacctccttggtggccttgaaaaccagcagcctcacagccatggcagctgtgaaactcagaagtctgttaaaccactggaagggacagaacagaactggagctcttgaaggaccatcctcaaagaaatgtcacaattcgaccatttggcagcttgcttgaaagggcctttctgagggctttgtctttgtttcacccaacacaggtcagctcacattgtgcaaacagctctacctgctgagcatttgttgaaaacaatcggtggtagttgtttaatcacagctgtctgaggtggtgttgctaattgaggccaagtggctgaccaaaaaattttttatttttattttatttatttatttatttatttttttgagacagggtctctctctgtcacctagcctggagtgcagtggtgtaatcgtgactcactgcagcctcaacctcctgaatttaagtgattggtcctcccacctcagcttcccaagtaggtgggaacacagatatgtgccaccatgcccagctaatcttttaattttttttgtagagatggagtctccctatgttacccaggctcaaacagtttttttaaaatggagaagtaaatgttccttgacgacttcaaaaagctccaacatattcctgggaatctagaaggctctgagcattctgagaaggctctaccttctctgctgtggcgatcttgaggctttatgcaagcctcaaggaagactaaggtagaattataaaccattcagcagagtgttgaaggcatgccccaatacccacacccacacgccctctcacctacccacccacccacccttagtaaaggctggaaaatttattaattcaaggcatgtaaggaaatctctgtgtagttactagcgaaccactaaactaagagtcttcagtggccatacatggcaaacaaaaaacaaaacaaacagactttatagaattagttcctgaaaatcactaatcagatagcaacaaaacaaaccctgggatgggggaagaatttgatttttagaattgacacattgtattagataaaatttctagtctttgacaaaaattagaagctatctcaagaaacaggaagatatgtcccatatacaggttaaaaaaacacacacacacacacacctcggtttctgcctagtttctaggatagaaactgtccttgatgaagcgcagatgttgggcatacttaaaacttaagtcactatgaaagttatgttcaaataactataggaaagcatgtctaaagaatcacatgaaaatatgcttgtgaggttgaagccaggaggattgcttgagcccaggagtttgaggctgcagtgagccatggtcatgatcaggccactgtactccagtctgggtgacagagcaagactctgcctcttaaaaaaaatattgggtgaccaaacagagaatgggaataaagaagtagagattataaaaaaaagaaccaatagaaattctggagtcataaactctagtaactgaaatgaagaattcactggaggggcttagcaggtatgaactggcagaagaatcagtgaactggaagacaggtcatttgagatagttcagtctgaacagcaaaaataaaagaatagaaaaatgaacaaagccttagagacctgtgtaacatcatcaaccatacccataatgggagtcccagaagagggaagatgtaaagggaaaaagaaggtatactgtgaatagttgtgtgtttgttctcatgccgctaataaagacatacctgggactgagtaatttataaaggaaagaggtttaattgacttacagttccacatggctggggaggcctcacaatcatggcagaaggcgaatgaggtgcaaagtcatgtcttacatggcaccaggcaagaataggagttgtgccggggaactcccatttataaaaccatcagatctcatgagacttattcagtaccatgagaacagtatgggagaaacttcccttatgattcagttatctccaccttatcctgcccttgacatgtggggattacaattcaaggtgagatttgggtggggacacagagccaaaccatatcaagttgtatgccaacaaattaggtaacctaaatggaatttatacaaattcatgtagatgcaaatggccataactgactaaagaatttgaaaatctgaataggccaataacaggtaaagagattgaaatagcaatcaggaaaccttccaccaaaaaatactgggtcacatggtttactgggtaaattcactgggtgaattctaccgagtattattataaactctttcaaaattttataattaacctgataccaaactaaagacatcacaagaaaactatggaacaatatcccttataaatacagaggccaaaatcctcagtgcaatgctagctttcctcccattctcactacttgtattctgtcataaaaaaaggattgtacaccgtgacaaagtggaatttatcccaggaacaaaaacttggttcaccataccaaaaccactcaatgtaatctgtcatgttaatagaataaaagacaaaaaccacatgatcatctcagtaaatgcaggaaaatcatttgataatattcagtactttttcttgatgaaaactatcaactagtaatagaaggaaaattctacaatttgataaagactgtctatgaaaaactcacagttaacatcatacttcatggtgagaaattgcatgctttctcctaagattatgagtgagacaaggatagtcattctcaccacttctatgtagcattgtactggagattctatctaggacaattagtaaaaataaaatagtaatataaataaaagcattgagattgtaatggagattggaatagaactataactagaaaagtatctgtagttacagttgacatgatcttgtatatagaaaatcctaaggcgcgcgcgcgcgcgcacacacacacacacacacacacacacacacacaaatcttgaactaataattgagtttacaagcttgtacatacaagaacattgaagcatccagaaatgaaattaataaaacaattccatgatacagtagtatcaaaaagaataaaatacttgggaataagtttaataagtttatgatttgtacacaaactataaaacattcttgaaggaaagtaaagaagacctaaaaaacaaaagaaaggacattccatgttcacggattagaagacttacattgttaatacggccaatactccccagattgagctgcagatggagtgcaatacctacaaaatcccagctggcttttttttttctcagaaattaacaagtttattttaaaaatcacatggaaatgtaagggacccagaataaccaaaacaaccttgaaaaagaacaaagctggaagactcacacttctcaatttcaaagctttgctacaaatctacagttatcaagacagtgtggtactactgtgtggacagccatagagatccatggaattgaattgagagtccagaaatagacccttaactttacagtcagttgtgtttttgacaggggtgttaggacatgaatggataaagaagatgtggtatatccatacaatgggatattattcagccattaaaccactaagctcagataaatgcatggatgaaccttgaaaacgtatggtaggtgaaagaagtcagacacaaaaggccacacgtttatttgaaaattctggaataagcaaattcagagacaagaaatagatgagtgttaatatgtgctggaggctggtgggaggggagaatagggtgtgatggtagtgggtatagagtttcctttgggatgatgaaattttctgtgattagctaatggtgatagatgcatagttttggagacacattaaaatcaatgaattatacatttgagaggggcagactttatggtatatgaaatctcaataaaacgtatttaaaaacaatatacagttaagagcgcatccagatacacctaaggtattagtaaagcggtgcattaagctgaaatatctggcttgtgcaaacttggggcatttgtaccttatgtagaattccaaaatctgcttaggattttccctgtccactggactgccactggcagggtctgcttccctgttcctgggttgagggagcagcattggagcatccctcaattcctgaatgaggaagttagttaaaagggcaatgtgagctgtagggccacactcatctaacaggtgagcttaagtttccattgatggcagacctatcagatgtttcctcccattctcactacttgtattctgtcattttgctcttatcctcccaaaatcatgctaagattttttttttttttttaagacagagtctcactctgtcccaggttggagtgcagtgatgccatctcggctcactgcaacctctgcctcccgggttcaagcaattctcctgcctcagcttcctgagtagctgggattacagttgcgtgccaccatgcctggctaattttttgtattttttttttttttttttttaatagagttggggtttcaccatgtgagccaggatagtctccatctcctgaccttgtgatccgctcacctcggcctcccaaagtgctgggattacaggcgtgaggcagtgtgtctggccactaagaatttttaaaataagtgacacaatgaagaacaaggccatagagatgatcttgggtaatttgagggtatcaaaaagtatctgcctgatggatggcttgagacactaaaaatgagtaaatgattacaaagtaaggaatgataatttgttttgaagaataaaacagattcttgtctctggtggttgagggatacgactgatgctgtatattaagacaagaagatgaagcccaaatggcagggaaattgaagagaagatacaggggtatctaggcacagggttggctgtgaaagtttcaatatgtaaaagatgataggctgaaaggaagaggatggtggaaaatacaaaagaggcattgataattcaggagtgtggagtgtgagagaagcttctccataggtgaagagttggatggacagtggttgttaggtcaaaataacaataataataacctagcacatatgtcagatatctgtttgggttcatcttacgcaccattctcttgggagggagcatgctttgaacagatccaatttatgatggagttttaggaccagaaagcgtcgtagtagcagagacttctcgtcctagagagcaaaggggaagtcattttttagttagttagtttgtgttttagacagtcttgctctgtcgccttcgcctcctggatgttcaaacagttctcccgcctcagcctcctgagtagctgggattacaggcgcacaccaccatgcccgactactttttctacttttttagtaaagatggggtttctccatgttgtccaggctggtctcgaactcctgaccttgtgatccaccctcctcagccccacaaagtactgggattacaggcgtgagccaccgcatccagccttagtttgtttctgagatagagttttgctcgtttcatcacccaagctggagtgcagtggtgtgatcatagctcactgcatcctcaaacttgtggggtcaagggatcccctcacttcagcatcccaaaatgctgggattacaggtgtgagccactgcatctagctgggaagtacttttaagagtatttttttcaggctgggtgtggcgcctcatgattgtaatccaagaggtttggaaggctgaggcgggagggtcacttgagaaaaggagttcgagaccagcctgggctaacatagcaagacccccatccctacaaaattttttttttaaattagctggtggtggtggtgtgcactggtagtcccagctactcgggagtgaggcaggaagattgcttgaatccaggaaattgaggctgcagtgaaccatgattgcaccacggcactccagcgtgagtgacagggcgagacccctccagatgatagctggagatcatgttattttcttactgattttcccccggtttagcaatacaaagtgatcgttaggttggcacaaagcacgatggaaaataaccattgttggcatcaagagaaatctcacaccacttgataaatatagtgaactagattactaaagagtgatttccctggattgcttgaaccagggctcagtgaaaatgttgctgtttgctttttttgtggtcaggattttttgattaaatgagaagcctacaaatatgcaagctagaaggtgttgtattttgggattaagccagactgtagcaggatgttagtaatttgagttgcataaactaatctggggaggcagagtgagtagctgatgtcacatgaagagcaaacccttgattccattcgtaatacataatagaacaccttcgtttctaaaactgggtgcagtaaagcataaaaaaacctttagtagctgatgaaagattctgccccaggcttgagtctattaaccagaaaaactgaaacaaaattaggcaaggtggtaagttttgctttcttttagtggaatattaggatatacagcaaatggtagcaggaccacgttgggaaaagggccaaaagactttttaaaaatcctgtttgaggtttggatccattttctttcatttttggacatacctttgagtagtgggtaaactgagagctcagtgaggtgagcctgtgtctttcagcgggcgggcgggctggagttggaactcctgtttcagtggttttcagatcctgctgatctccagaatggctccagttcccccacccctaatgctttattatgaaaaatttcaagcctgcagaaaaggtaaagaatgtacagtgagcacccatataccaaccacatggattctgcaatgaacattttaatatacctgcttttttttttttttttttgagatggagtcttgctgtgtcacccaggctggagtgcagtggtatgatctcagctcactgcaaccactgcctcctggattcaagcaattcttctgcctcagccttctgagtagctgggactacaggtgcgcgccactatacccggctaattttttgtatttttagtagagatggggttttgctaacaggccagtctggtcttgaactcctgacctcaggtaatctgcccgcctcagcctcccaaagtgctgggattacaggcgtgagccaccatacccagcctcataacggctttttttttttttttttttttttttttttttgagacagggtcccactttgtcactcagtttggagtgcagtggtgtgatctctgcagccttgacctcctggactcaagtgatcctctggcctcagcttcctgagtagctggagctacaggcatgtactaccatgcccagctaatttttgtattttttatagagataggcttttgccatgttgcccaggctggcctggaattcctgagttcaagcaatctacccacctcggcctcccaaagtactggaatctctttttttggaatacgtttcaaagcatgtgatagacatcggtacagtacagtcctaaacactgagtgtgcacgtcgttaactacagtttaatatttgttttgtttctggatcttttccagggatttttttcaagattaaattccaagcgccatgatagtttctgagttagaaggatggggcaggcccaggaatcagtactttgaaaagctcccaagtgcttcttgtgatgcatcgggtttgggatcttctgccccagggagcgcttcccgattacttcatagctaatcctcacctaaaatgcagaggtgggcagttatctttaacctgaccatagagctccatttttggttttcttggaatcttttgtttaaaacagtggttctcaaccaggggcagttttgtgcctcgagagacattggacaatgtctgggatggtttggttatcacaccagggggcatctagtgatgagagatcagggatgctgccgagcatcctgtaatgcaccggacagccccacaggatggggagttatctggaccaaaatgccaatagtgctgaggctgagaaacgtatttttttttttttttttgcctaaaagaaaattgcttgctccagatgactccagacaaaccaaaataaaaataaaaagtaaaaactaaaatgacaacatgaaatgaatttttaagagccaaatgagacctttagagacaatctcatcactgcctacctggtttccgtcaaatacagatttatgctccagaaagtacctaatttattaaaataagctgatttctaaaagcttgttagatggtcagtaatctcaaactttgagtgaatttacttgaaaaggtaatgttgctggtggcctttagtttcttttaatatatcttaaatatgatatcaaagaaaaacagaacatgatgctttgggatgaatgtaatgaatgaaaagcaggattctttggcaggtaactgtgtcccaggccctgtcctgcagggtggcagggatgtgctgagctgggtgaggggggaccgctgagggcttctctcagtagttgctctgtgtagaattttctgagtgtcttgggagaatgggggcatttttcctgaaggtctcacttgactccacagtgaatggctttacctgtctcttgagtaagatgcatttctagtaatgctctgactacttagtccacgtttgactagtttttaggaaaacaatatgtacaatggaacagaaagcttacagaaataaagggcagttcttttcttgaggtgaaagtgatgtggggagccagtaggtgacaggatttgctctggcccctccgagggaggaggaagatgaaggtgaaacgtggtattggtcagtccgtttcctgcttggttgatttcagggacctgatgagacaatatggtggtgaaaacagactgctggattgcaatgggcggaactgggcttagtctctggataggtgtcagttcatttcacacctgtcattgagggaaaataatacctgtatggctgttggaagattaaatgagactatgaacgggagctgtgtggataaaatgtaccaggcactcccagtgccagaaggtgttcttgttagttctgggtgtggcgatgtgcgaagacacccgtgtctgcggggtgtgtgtgagctgcagataaccagcaggtcctgctgatgaggcaaccttcttgggagtcttggctcagttccggggtttaattacgatgtatccttgggcaagtggcttaatgtctctgattgtaatttccttcattttttcatatctaaaatgaaagaggtgcttggatattcctaagggttcatctttaggagtctgtacttctggtgtggagctttctggaaaaaggcttctgggaatctgaaatggcagtagtgatgggcgtggtaacagcagtgttcatacgcttcctcagtaattttatgtaacaaacactcacagtgtacttactgcccctgagatcttaaaaactctcactttcaactttcacgacaccctataacttaggtaactgctattatccctggtatacagatggggaaactgagcctcagagaggttggtgatttgccccaagtcatagctgggaagtggcagacctcgatgggatgcaggcaccctgccctctgggctccgatcacttggccacctccccgcatgcaccacatgggctgtggagttggaggcatttgtgggcttcaagaatgagagttggtggggagtatgtgtgaggaaccggaggggtcatttccctgggactgggattgtggaggttttgattttgcttttccctttttaaactgggtgaggtatgagcatgggaactctgtacggaatgtgtcattggagagggacagcagggacaatgaaggtagtccccagagaagtatgagaaactggcattcagtgctcatgcagaattctctttgttttaataataatacaaataataacattaatattatttttagaggcagagcctcactctgttgcccaggctggggggcagtggcacgatcatggctcactgtagccttgaactcctgggctcgagccatcctctcacctccctcagcctcctgagtagttgccatgcgtaacaccgtgccttgctaagttttaaattttttgtagagaccgggtctcactgtcttgcccaggctggtctcgaactcctggcctcaagcagtcctccaccacagcctcccagagtgctgggattaaaggtgtgagccactgcaccctgcctaggattctctgtagatggggagcccacctgggtgagatgccagacacctggctccggcatatgcacagcagtttcacacgagcgtctcttactcaggtttcagagttctggtaaaagatttaggtttgacatccaccctttgaggtttttggttctcacatgtttgataacctgaagcttgtgggtttgatatgggcagtaaagtgggattatttctgttagagatccttattccctagagactttctggtctggaaaggtgagaggctatatattcattagctggaaccaccatgtggatcatttgttggaagaactgttaggaagaagacagatattgctatagagagcagggccagatgagcgagaaggcaaatgtacttcattcctgtacctgcaggcttattagggacagatgccctcaggcggggatgtgtagcttcacttgactgctctaaataaggagcgagagggtggtgtgtgtgttaaccatcaagattaagcaagcaagaaaaagacaaaagaaagccatcatttagtaactggtggagtgagttggagcctgggagctgccccaggacaactgttatttcccttgatcttcctcaaaccctaccaggaagtgagggcaacagttccctaaagcagccccatcaagctcttaagaaagcagtttcactgggagtggggagaggtagaattgggaggtggtagagggctggggggtatgaaatgtgagggccggagtcctcagcatcggaactccagaaataaaaagttgtctgggtctttgaaagcctcctatatgataatgttacagtaacagtgttctctgctactttcaatgaataaaaaacctagggtttctcagctacagtgtgcattaagagacatttgtggtctagttttggcacttcatttctatttgggaacatgcattctgagttttagacaactagcttccaaatgaaattttggaacaccaccctttttttttttttttttttttgagatggagtcacgctctgtcgtctgggctggagtgcagtggcgcgatctcggctcactgcaagctctgcctcctgggttcacgccatgctcctgcctcagcctcccgtgtagctgggactacaggtgcctaccaccgcgcccggctaattttttatatttttagtagagacggggtttcaccgtgttagccaggaaggtctcgatctcctgacctcctgatccacccgccttggcctcccaaagtgctacgattacaggtgtgagccaccgcacccagctggaacaccacccattttttaaagcagagaatttattgttatttgcacaaaaggacgtttgaacactttaggaaatctggatgctggaattaactcggtcaaaacaaagcaaaacacacagaatctcgtatcttttcctgccctgatgctgaactgcagccttgatttatgttttgtttttccacttttgtttctgaacctatgtggtacaggctgaacccttgtccctgcttcggagcacttaccttaattattatagaaaaaaattaagagttggctgactctgtgctgaactttctggtttttttccaggcagtttctccataacaaatgcgttttgcatagaattgaaattgcctatttacctcaatgacaccatcctaatagttggtggtaactacctaatctaataatctctcattgtgtgtgatagggctatttattgtattttagagtgaaataatgcattttgtttgcattttaaaaaggaatggtacaggaaatgattgtaatccaggactaaatatacagtttgcagtctttttattctaattgctttctgatgaatatatatatatatatatatatatttttttttttttttttttcttgagatggagtcttgctcttgtcgcccagactggagtgcaatggcatgatctcagctcacttcaacccctgcctcccgggttcaagcaattctcctgcctcagcctcccaagtagctgggattacaggagcctgccacaacgcccggctaatttttgtatttttagtagagacggggtttcaccatgttggccaggctgggctcgaacttctgacctcgtgatccacccgcctctgcctcccaaagtgctgggattacaggccttctaataaatattattttacacatcgagatagtactgtttatgcattttgtatgctgcctcttaaatctataagcattttcttttcttaaaaaaaagctttgggctgggtgcattggctcatgcctgtaatcccagcactttggggggctgaggcaggtggatcacctgcggtcaggagttcaagaccagcccggccaacatggtgaaaccccgtctctgctaagaacacaaaaattagtcgggcatggtggtgcatacatgtagtcccatctacttgagcgtctgaggcaggagaattgcttgaacctgggaagcggaggttgcagtgagtggaggttgcagtgagctgagatcacaccactgcactctggcctgggtgacaagagcaagactccatctcaaaaaaaaaaaaaaaaagctttgataaatattgtacatgattgcaaagcgtcccatcgtgtggatgttcacttagttatttgatacatatttttgtgttcttgggctgtttctaatatttctgtattacaaataaggtgatgggaagcagtttcattcatcaatcattctttttaaatgtcccttcctatcagtttctgttaatcagtcaaaagcgtatacattcttagcaggaacttaaattcttagtaggaatcttaacaggttaagatttctaagggtagagagggtacctgttttgttaaccggtggcttaataccatttaataccagtaaaggctcaataaatgtttattgactgaatgaacagaaaagatcagtgatcatgaagaatggcccagttagtggtatatatacgagaagtgctgcagtggttcacagtaacatgataataactaattgtgtaatgatttggcacgaggtactgatctaaatgatttatacattgttgcatgggattttggaaggggagggagtatacctctaaattagttcatgctatgggatggaagtaagactttaaatttaggtgggctcaaaaaacagaaacaaaccaggggccgggtgcggtggctcacgcctgtaatcccagcactttgggagtctgaagcgggtggatcacgaggtcaggagatcgagaccatcctggctaacacagtgaaaccctgtctctactaaaaatacaaaaaaattagccgggcgtggtggcgggtgcctgtagttccagctactcaggaggctgaggcaggagaatggcatgaactcgggaggcagagcttgcagtcagcagaggttgcaccactgcactccagcctgggcgacagagcgagactccatctcaaaaaacaaaaaaaacaaaacaacaacaacagaaaaaaatcaaatgttcgtcagctgatgagtggataaacaaaatgtggtatatccatacaatgaatgctatgctatgctgccataaaatggagtgaaacattcatacatgttgcaatatggatgaacctgccactcaagtagctggtactacaggcatgttccaccatgcctggctaatttttgtattcttagtagagacagggtttcaccatgttggccggcctggtcttgaactcctgacctcaggtgatccacctgcctcagcccctcaaagtgctgggattacaggcgtgagccagtgcgcccggcccaaagcttttttttaagaaaagaaaatgcttatagatttaagaggcagcatacaaaatgcataaacctggaaaacattatgggaactgaacgaatccaggcacaaaagaccacatattgtgtgattccacatattccacatattgtgtgattatatggaatgtttggaacaggcaaatccacagagacggaaagtagattagtggtggcatagggctggaagaggaaggaaacaaggactaactgctaatgggtacaggattttttttcctcaagtgatgaaatattcttagattatgaggatgcttgtacgactctgtggatatactcaaaacgatttaattgtatactctaaatgggtaaattgtgtataaattatgtctaaataaaaccatgaaaaattggatgaggtttagcattgtagaaggaaagatgggggtggtggtgtgttagtttttgagggctgccatagcaaaacaccacacactgggtggcttaaacagtaaccatttattttctcacagttctggaggctagaagtccaaaatcaagatgtcagcaggtttggttttccctgaagcctctctccttggcttgcagatggccacctggccaccttctcactatatcttgtggggtttttgtgtgtgtgtgtgtgtgtgtgtgtgtgtgtgtgtgtgtttgagacagggtcttcctctgtcacctaggctggaatgcagtggtatgatcatggctcattgcagcctcaacttcctgggctcaagagatcctcccaccccagcctccagagtagctgggactacaggtgtgtgccgcaatgcccagctaagtttcgtaattttggtagagactgggtcttcctatgttgcccagcctggtcttgaattcctgggctcaagtgatcctcccacctcagccccccaacatgctaggattgcaggtgtgagccactgcgcccagcctggtcttgtctttgggcacaaatatccgctagtgtctcattgcgtgtccacatttcctcatcagctctactggattagagcccagcgtaatggcctcattttaacttaatcacttctttaaagtcccagtctccaaatacagtcccattctgaggtagtgaaggttaaggctccaatgtgaattctgggggaacatggttcaacccaatgagaacaatggttatctgttgggagtgaggactgatatgagtggagatgcatcggtaaagatgcgcggaccacagatgtgacgcagcaggtgtgcacagaggtatgggatggggtcagtgtggagggccgtgtgccaggcagcagtgtggacttggtcctctacccagcgtaggggggtcattctgggggctgaaccgagggtgacactgtaaaaccatgcttcaggaaaattcatctctgcgccctggaggatggactgaggagggaagaggctgagggaaatgagtgtgcaagataatgaggcgatcccaagggaagtaaaaggattggaggccttgcaaaagcaaagcgaacccaagcttcagaacggaggcatctgagatgatgtcacagttttgaaccttatttatagaagaaagagggtgaaatggggaattaggtaaatgaaaatataggtcccattgttggtaagatacatggagtgtcattgattcagtatttagtgtgcttttccttattttaaacagctttcatagctcacttccaaactgtatttttgcaaccaactctttttctctctctattaaaaggagaatcttttattttacactaattaacagctgattctcctaagagagttttcaggaacctaaacctcagagttagatggagacaagtgtctttgttaatcatttatgtgaggtcagattgtacaatttgtaacagattttacagctggttcctttattaagggatgggtaggattcctactaattattattttgagttttactttgtttttaaccattgaaacttgggggatgtactctttggtttgggtagattttgcttatagatattgaagtttgagttgttgaatttcatacatattttattttgacttttaatcctttaaaacatttgactctgactccattgagctctgtagaacatctgtcatccagatcttttgccagaatatagagccttgattggacaccttgccagctaatttaaagcttcccaagatgcagaatactgtgtaaaatgtcctacctgttgtgtcagaagggagaaaataagacgagattttcatatttgcttgtagatccataagaaacttgggaagaattcctaagaaactagcagtagtggttccctgcagggtgggggctctggatgtgggtgtggcaggggatgggagagactggcaggttgaggagcagggtgagagggatgtttttatgatgtacattctcatatatttattttgaactatttgaatgtattactcatgtaggaagacaaacctttactttccaaaaatattagggaaaaactttcaagtctctcatttttagcctttttgttgttctgatatttccacacaggacagacggtaacatgcccgatacattttaagtacaaacaaggctgtaagttgccttacttgactttcttcactattttctattcaaaaaagtatttttgaatccaagggaattagaggaataatcttgaaatgattatgttttgggggaaaagtatattattaatatgatagttatctaatgttgtgtaacaaattgcctccaaatttagcatatgaaaacaataagcattcattgtgtcacacattcattctttcttttcagtgaaagttaacctgtttccatctgaatagatttctcactctgtatcctgccagtaatcattttgtactgtttctgtgcctttcaatccaagagtccaacctgatgaggttctgctggtgtaattcttttaaaagcattgtggatgtcctgtgaatctcactggagttcactttttaaacattagacttctgtggagactgctgaaggacaacacccttacttcttagggcctttggtttgccagaattgttctctgagccattgccttggattttttcctgacttcttaacaaaggattttataggtgggaccttcaacactctggaaattgccttagctacattcagccatctccttaggtacattttccatctcccacattgtagcaggcaatggcgttgctaaactttccatcaggaaataacaaagatctccttttccagtttccagtaacattttcctctctacaccatcatccacagtctcctgaaaggccctccaggttctagcttttccagggctcttcaggggttttcgaactctctttttacagtctttccagttcctgcccattgccacgttccaaagtcactcacacattttaggaatttttctttttttctttttagcaagcataccaattccagttaccagaatctgttagtttttgttatgtgttgccgcagtacagattgcctcaaagcttagtggctgaaaacaaggaacattactggccaggcacagtggctcatgcctgtaatcccagcactttgagaggccgaggcgggcggatcacctgaggttgggagtttgagaccatcctgaccaacatggagaaaccccatctctactaaaaatacaaaattagctgggtgtggtggtgcatgcctgtaatcccagctactcgggaggctgaggcaggagaatctcttgaacctgggaggcggaggttacggtgagctgagatcgcaccattgcactccagcctggacagcaagagtgaaactccatctcaaaacaaacaaaccaaacaaaaatgaacatttactgccatacacacttcctgggggtcagggatcccagagtgtctccgctgtgtcagtatgtctcagggtttcctgaggctgcagtcattatgcccgctagggcttgggtgggactgaagcacctgcttccaagttgcctcactcacatacctggcaagttggtgccgttgctggcaggaagcctgcttttcttgccaggtggacttctctgaggggtgcgtgaatgccttcactacagggcagctgacttccctcaggacacatgattcaggagaccaggggaaagctgcagtgtcattttatcacataatcccagaagtaacactctgtcatttctgcaatatcctgtgggttacacgtcagcattattcattgtgagaggtgactacatgagggtgagtccaggaggcaagaattattgggggctatcatggaggtttgataacataattggtaagaaattcagatacacctcagacttgattgtggcataccagtgtgttgtaaaacttgtgagaatggcttgccttagaaagacaagtagtccatccagtgtcttattcttatgttaagttgggattgctattttgttacccttgggcctctatatacaaagcctctcatagtaatagatctaattgggttgaagtttagtattatgtatatgccctctgcttttattagtagattttactttcgtgaaaggaacatataaacttcattattgcatttttgtataaatgcagctggggacatggttttattacccaatgtccattttgtaaatatttagagaactttttttttgcatcataaatcagtataaatagaagcttggtttccattgttgccctggctatgaggaagctgagagtgaaatttgtcgttcaagtgtggcagttatgttactgactggcgtatttatattctcctttatttgatattttgctatgagatgttccagtttacttgtgggaaaaaaagccaggtgttcttgaactcaacaaatatttattgaattccacttgctggccagacagcattccatgtgccccagatatggcactggacagatagataaggtccccactcgcctacagcttccaacctggtcgtaagaaaataccttagcttttgctccataatgtggaagaattggcctcagagaaaacctaattcatatgtaccacgtttctacccattcaagttttatttcataatttttttttttttttttttttttttgagatggagtcttgctctgtcacccaggctggagtacagtggcacaatctcagttcagtgcaacctttgcctcctgggttcaagcgattctcctgcctcagcctcccgagtaggtgggattacaggtgcatgccaccatgcctgactaatcttttgtatttttagtagagatgggctttcaccatattggccagcctggtcttgaactcctgacctcaggtgatccacctgcctcagacttccaaagagctgggattacaggcgtgaaccacgatgcctggccgtatttcataattctatctttccatagaaagaattggctggggcacgtataactaatgtgagttactgatttcagaggaagcttttggaagtggttgataggcactgaatgggatggggtggtgagtggtttaaaataacacttgaacctttggattcaaatggttttaaatgcatctcagaaaagtgaaaggtgaatgggagagctacatccattgagagcaagggttcatcagctagggctgtggcttaaactaagcagatattctttcctggcagttctacaggccagaagcctaagatcaaggcgtcatgagggttggtttctctgaggctcccagacagtcatcttctccctgtgtcttcacggggtctttattctgtgtctgtgtccaaacttccttttccttttttttttttttttgagacagagtcttactctgtttcccaggctggagtgcagtggcactatctcagctcactgcaacctccatctcccaagctcaagtgactctcctgcctcagcctcctgagtagctgggattacaggtatgtgccaccacgcccggctaatttttgtaattttagtagagacggggtttcaccatgttggtcaggctggtctcgaactcctgacctcgtgatctgctcacctcgtcctcccaaagtgctgggattaccggcataagccaccatgcccagcccaaacttccttttcttagagggtgggctttatctgtggttcttagttagcctcaccttcattcttccttttggtgttacggtcttgcttactgctttgggaatggatttgttgaaactacatgtgactagtttagggacccagtaggaggttttactataagtgtaaattaacatgtgcctttgggggaccttaaaagtttttgtcattgggccatgagatctgagtgcagctggtagaacctccttgttttctttggtatgagaactcctgggcttttgttggttccttccgttttctccggtgtattaccatttcacatcacagtgatattatccagataacacccatgatttgtttttaacggagtttcactctgttgcccaggctggaatgcagcggtgcgatcttggctcactgcaaccttcacctcctggttcaagcgattctcctgcctcagcctcccaaatagctgggactgcaggtgtgcaccaccacgcctggctaatttttgtatttttagtagaggcggggattcgccatgttggccagactggacttgaattcctgacctcaattgatccacccaccttggcctcccaaagtgctgggattacaggcacgagccaatgcacctggccacacctgtgatttattttatttcatttgagatttcagactttgtcgcttgttctttctgtagaagttttttcatagaagtatgttgtttcaaaagcaaccttcaaatagtagacttagcttggatgagaatctaaaagtctttgagtccaacaaccaagcaggtcccctgtccaggaagtaccttatagctgatgtttgagtatccctgcagatgggaactcactacctcctgaagcaccttacttctacccttggaatagtaacagagattaaaatgtccttccttaatttgaggtgaaatctgccttcttgtccattttacacacactaaccttccttccaccatgcaagctgagagagagccaggttgagcctgtgtttccacaacaactcttctcagacctcctgctgccacctaccatgcacttgctcttcactggctaggttccagttgctctgtacctttcctaaagtgtggtgaccagaatttggcacagtgagggaaggttccagagccctttagtgttatcgggggcacagagcttgggctttggagtcgctcagatcttgagttgatatgcacttctttgtccttgagcaaatgattgaaccttcttggactctcagttcctcattaataaaatgaagatgaaacaagatgagatggactgtgcacatttcctgatgggggctggtatgtgctggtgcccagtgcaaagtggctgctggcagaatggtgagtcaccagtacctgctcccttcactgagtgcttcctgtgtgcctggcaccattgctcagggctttacatggacttactcatttcattttcactgcagcctagagcgtaagtaagtatttgctttatccccatcttatagatgaggcatttgattctcaaaaaggtttcatagcttgcccatgttctagcagctagtaaaaggagaagccagagttttcatttaggtgggagtcctcaacctgctttcttaactgctgtgatctgcactgtggcatgagagtttgtcttaatgtaaatgcacatgtaatagcattattcacattgcctgagactgtggaagctcctttggcaaccagatgccacaggggactcatttcatgcttttagaagacttgagccactacatgccctgggaactgtgttgcttccccactggccatcactcttgcttttgtaagggatgtcacattgagccattaagtgtcatctctggaactcatgactctgttattccacatattaggttttctttgtagctttgtgtcaactccaagccaggtaaataaatcttggaagaaccaagttacagatgtgagtaaaagaggggatggcagggggcagaagtcagggcaggccctgtgacttgccaccagcatcctcccttcgggggaggtcctttcatctgggtgctagctggaggaattggcaacgtcggagataaaggtgtagatgcaccagctgaacgtcttgctctgtttcccattttacgtataagatgggtgatggcatgctgcattcagatccccatgggtgtatttgggatttggggtgggggattgtgtgtagaaggcaggaaagattgcccagcaactctcatttgaattgagggtggaagcggttctcgggcacagtatgccaaggcccagggcgtccaagggacagagcagagatcacagatgctgaacgggtggggaaggagcactaggcagggcatttctgatgagactttgatttgggaggtacgaaagttgtatgaggaatcttgataaactgcttagagtgaatggagatgagtaggaatcaccaccattcacatactggctctgcaagccactcagcacagctctgcacctgctcttatggaggagaagacaagcagaagagaatgttctgatctagaagagttcgtgtaagagcatgaaggcaacagcacttgagatgtggtgcacatgagcaaaatttcagtttatgtggaatttaagattaacagattaaaaggtaaaattctctccctggtaccaaaaaaaaaaaaaaaatccatgtactccctctctctcttttttttttgtttttttttttggagatggagtctcgctctgtcccccaggctggagtgcagtggcatgatctcggctcactgcaagctccgcctcccaagttcacgccattctcctgcctcagccttccgagtagctgggactacaggtgcccgccaccacacctggctaatttttttttgtatttttagtagggacggagtattccctctcttgactgatgtttcagcagtatgtggacagattcttttttaaggtaaatgaccaggggcttgtaatatgagtgtcacttaggcaacaggacatttcaatgaaatggtgatggaaataggttctttttgtagattgtgagctcttgggagcatggattttgctaaatatactgatttttaaatttttttgacatctagcatggtgcatttcacataggagtttttcaagaagtactcatttcacaggcatcttgaatgatagatgtttggtaagaactgcgcaagacagtgtactaatcactcattctcattcagcctctcaagctatcatggttggttagtaataacatttcaaaattatatttgtcccttaggctagcagagaatactgtttaacaggtttttcttgaaaagtaggagtagcgagctagagttgtctctaggtggggtaaataaaacatctcccaccccacccaaattgaagctgaataccttcaattcactactgtgcgcatattcatgtttcatgctgagcagttcacttgagactttctcacggaaagaagtgcgatacagttggtggtagtcttatatttgctacgtgctcatgtgttgtctgatgatagaatgcagtggtcaaatattgcacaatttacgccagaggaggagaattcccatcaactctccaaccatcataaatactttattccacacaataaggaaattgaacttttcagaagaatgatatagaacatctaaaataggttaaacttggaggaattatactgtccattgtaaaattggagccactcttgaaaaattgctgcatgccccactgaatgctagagcaagacatgcagtcccagctccaggggcttccagagtgattgaggcagggctgtgggctgctttcctgaagcctgactcctttctttcctcattacactgccacagatggtggcagatacagcatggattggcataagtcactctctactacctgcagaataaaggcccaatttcctagtgcagcttgcaaagtccttctcatctgccaccttcctgcctttgtgatttctcctcctgggactcctgcacccccttttttttttttaatttttcttttcttttttttgagatagggtctccatctgttgcccaggctggagtgtggtggcgcgatcatagcttattgcaggcttgacctcctgggctcatatgatcctcttgccacagcctcccagatagctgggaccacaggcacatgccaccccgcctggctaattttttgtatttttttatagagacgggatttctccatgttgcccaggctggtctcgagctcccgggctcaagcgatctgcccgcctcagcctcctacagtgttgggattacagacgtgagccactgcacccagccactcctgcacccttaccttttcgccgccctggccggctggacgactgcacccatttcacccggcattcttgtgcctgactgtgctctggccatttcctgtgtctggaatacccccattctcccatgctcagccccgtggactgtgtttattcgtaatcacacctcagagcccttccccttctccatggactccacccctgctgtgtagatggccccaacatcattttgctgagtggagtgccactgcaaggcatggcatggaggagcctgactgcataggtggcggcaccttgagggccttacagacctggcagttgaaggtatgggctagaagacagatgattccaaattacggctaagaaataggtaggctgtaaggcttgattgccgtgaatgcctctagaaagagcacttaaaaaaaaaaaaaaaaaagaagggatttccctgttcatggcctatgagtttaaaaacaagcaccccatgtcattagccctttgctcaccacagagttgctgacacattagacgatctagatatgtgtctgagattttggatgcctattgattgtgtattcacttagactttggtgcttttctagatgtttcacaagttaagatgttgttaagaggttctcattgttttattcctatgttctttccttccactcccaactcactccgatgtcactcatctgggttcttctgctcctgcctgggctgcttagtatttattgagctacacactgtgcttggcacccagggccatggaggcaggcaaagaggggggacatttattcagcagcttcttactgagggtatgggtgccaggtgctcgctctgggaaggtgcaaatgaaatggatgatggctgagcctgaagaattcccagggtgaacagatggggggaagccagttcgggcagagggagtggcaaaagctgctgcttaaagtcgttgctcccaccgcgtggggagtaattggatctgtctgcagcactgaggcctggacaggaagatgggactggaatgcagaggggccttgcagggctcagtcggggccaaagggcagagaggcagggcacagagagaagctgtggccgccttggttggtcccatggaatcctcgcccattggggccatgggcattgatcgacactgtggagcttgaaatctcaccaggtggaaacatctctgccagccctgtaatcatttccatagtttcttctggttcttttcatgaacattttccaatatttttatttgagcattaataaaaggtttgcctatatacttaaatttctgccagaaagctttgacttccgtgatctagagcaagcttgtgcaaccacaagcaggtcacatgcagcccaagatggccttgaatgtgacccaacacaaattcgtaagcattcttaaaacattatgagccttttgtgtgatttttttttttttaaactcatcagctgtcattggtgttagtgtattttatgtgtggcccaagacaattcttcttcttccagtgtggcccagggaagccaaaagattggacacccctgatttagagttttaggacttaggttttgggaatgccaaatgtttacatggaaaggctcatccattaggatgagcatggttttcctcatgaactccttggtagaacctaatgttagtgtgtggctcttttcctttattattttcttctgtacagggtactttataaccaatagctgtttctgaaaatatgggaaaactatttttgaatattgaatcaattacattttcagggtagtttgataaaaggcattctgtggtcatctttatctaaaacgaatcctcctggccttagtgtgattattttattttatttattttattttattttattttattttattttattttattttattttattttattttattttattttatttatttgacagagtcttgctctgtcacccaggctggagcgcagtggcgcagtcttggctcgctgcaacctgcacctcccagattcaagcaattctcctgcctcagcctcccgagtagctgggattacaggcatgcaccacaatgcctggctaatttttgtatttttagtagagatggggttttgccatgttggccaggctgatcttgaccttagatgatccacccaccttagcctcccaaagtgctgggattacaggcatgagccaccccacctggccttagtgtgattttgtattttatgttgtgagttttgtttttaaaaaagaacatcagtaagttcagaaaccaactccatgcttatttgctgtaatgaatttttcccttacattggaaaaacacagttccatctgtcctgaaggcccataagtcacagaatgcggtgtgttggaatgtgaaatcctttcagccttgcagaatctttatcattgtgctaaattgccatgtggaagaatggcaggtggcagttagaacttagggctttctatttattctctttctattttgcattagtcagttaaggttctgatcttcagaactttgtatgaaagtcagtgcttcatacaatttcacatcaaactgtggcattgcaagaggcaaaccatttggaattcttccttaaattacaaaaagaaaaaaaaaagtgaatgcacgaagattgttttgttcgcaagacttatgacacagccctccagctctgtggcttttcattctgatgggaaggaaatgagaccattgtaaatgactgttcagaatattagtgccagctccatgccaagtgctgttaagaacatggagagagcattcgagtgtttgcctctgaatttttgcccaggccatagttcgcagttggccggcaggctgcaagggccattccaagtgggagaagcattccatccctgggacaagtaaacagaacctaaaacaaacacatgtttagttgaagtgatacagcaccaggcaaagtgttctacttttaatgagtgaaggacatcagaaacaaaggatcagagccccccacgttgcattctcaactaattatagcactaaggcaggaatccttggccctttatctggagtgagtcagagagtatatcatgccttatctaaagtctaaagttaattgagcccaaggcccttctgaatagacacacactgtaatcagatatacagatggagtgggaagaggtaaatggtttcagatgccagcctggtgtagttgcatgccggaggggacttaaaggaaacagtgagaagtattagaaaactgtagttgaccaggtatggtggcttatgcttataatcccagcactttgggagactgaggctggaggatcgcttgaacccaggagttcaagaccagcctggacaacatagctagaccccatctctacaaaaaataaaaaattagctggatgtggtagtgaacctatagtcccagcaacttgggaggcggatgtgggaggatcgcttgagcctgggaggtcaaggctacagtgagccatgatcacgccattgcactgcagcctgcgcgacagagtgagattctgtctcaaaatagcaacaaaaacaaaaaccaaaagtatagttgcagagaatggctttccctgcttagttttatccagatgactgttagaatagtggtgaagaatctgacaagtggcagaatgcagggccatgggaagggggagagttcatgcctaaggtcagctgagcagaggagacttggagaactgagaggggatccctctcctgtgtttgttgggagggacagagcctgttgcccagcctgcaggtgtgggagggaccctgcaagaagtccctttggtcaccctcttcaggccccacattgcctgatgaggttcagactcctaggcctatgaagggtaataaggcccgtctgttcctgcctttacttttcttctatcagtttctaagcactctcagcctccgggcctttgatcgtggagcgccatgatacagtggcgttgtcctgagtggttagaggtgtgaattctcgaggccgactgcctgggtttgaatccttgcttggccatcttccagctgtgtgaccactctatgcctcagtttcctcatccgtatgataggaatagtggcagtacctatttcatggtgttattgagctgtacagttgctagctgctgccatcatcattgtcatttcctcatttcttttagacccaaactctcacactttccggaattatttctggagccccccagaaggaattggtctcttttattctagattccctaagaggcacagagggatactagggtgagaagatagtggtggctcacagtcatcactctgtacttactagttttgaaaatgtatcaaattgctgacgtctctgagcaccagtttcccaatgtgttaaagaaggatggtgatacccaacccatgtcacagggtttcgtcagtaaatgctaaaccatgtggtaagcagatgttctcagtgagcaccaggtcactattattatgttacttgtcatgacgagttttacttgccaccttgtattatagttgtgatgactatcttttttctagcctcactgggacacatgaaattatagagttaaatgaactcatttgtagatacttgaaaattgtaataatctttgaatatctgtacctgtttgtgtccagattcttctggttattttgacttccttataccccagtgtccttttttttttggagacaagtttttttctcttgcacaggctgaagtgcagtggtgccgtcgtagctcactgcaaccctgaagtcctgggctcaagcaaatcccagtgccttataagcaggcttcctcaaggcctgttgtcttactcatctgtattttccttatagcatctaggtcagtgccttgcttataatgggcatttggcaaatgtttgttgaatgcatttatcattacttagtaataaatactaaactattttttaatgggaaaataggcaggtttgggttctcatgcacatgacccacatttgtcgaatgtctgctgtgtaccagccagcagctttcttcctttagtgctatttcctgttagagtgggatagtggtatttcagtccacctgatgaccatttaggccaatcacatgttaatgggaattgaatgcatgcattaaacacaacaccagcgggtgctgtccacattaaaaccaggaggtctgcttcattggttcttgactatattgaaagagttggaaatctgacctgggcatttgaggtagactctaaggggtgtaagacggccctttgttttagagacttaggattggtgtgagtgactggcagggactgctttagtgcccagacctttagtagcacacacacaatataggaaaactcttcaaggaaaaccagccccaaataagagagtaggtaatgttctgcttctcttgctttatattctgcttgctttacagaataatctgagatagctaataatcaaagttcaggcccccaaaatgaaagtgatcatcatagaaccagaaaagaagggataaaatactgatttcaaggactcctgaagccaatggcagctctgagtttcctggcagccaagacaaagacagaagcatgctgggatgatgcatcctcgggctcggtaaaggaagtacaggacctgcctgctgctgtgggctcagggaaatgagtactattttccctgtctggagtggggaggagcacttgtctgtggtagggtgaggaggaccacttccttgggctatcagtcattaaggccccttaacatcatggccgattctgaaattacctctgaaagttgagatttatgttagactgtagctctcaagccagttcccttagaggccagagtaatgacagtgtaatttacttgccacctgcttgagagagacaattggtggttaagggactttcccaaggtgataaattgttttagcaaacagatccagaggacagctcctttcccctggtctatgtatgccttttgaacgccaagaccttatcctaaactcaagtttcacgaataggattaaaatactctttggggacctttcttacattgagaacagaggctgggccacagcttggctaaagcattccagatctctcttctgagcaagagattttgacttgttcataaaccaggctctctctcatagtgggcaaggccttaaaaacaaacaaacctgcaaaacctgaggaaacatcttcctcctacgtacttagctgatgtaggcattaatggaaatggatattggagtgggaggctccttttagggggcagaaaagaaagaacgtttttatttttaattaaaaaaatattttcttttgagacagggtcttgctctgccatccaggctggagtgcagtggtgcgaatatggctcactgcagccttgacctccttgctcaagtgaccctctagccttggcctcccgagtagctgggatgacaggcgcacaccaccatgtctggctaatttttgtattttttgtagagatgaggtctcactggcttgcccaggctggtttcaaggtcctgggctcaagggatcctccctcctttgccttccaaagtgctgggattataggtgtgagccaccgtgcctggatgaaaaagaaataacttgattatgggttatggaagtttagcaatggcttcaaaaaatgtcagcagggaatggatgtctttttctttcggatgaaatttcagtattcatctgatacagccaaccaggagaaggaaaactactaagtagaaagacttagataagtggagtcgaacatctctgggcttaaaaggagcatcactcctggcatattcagcgtggcccagctgtgtttctctgagggcgatgtcctcctcagggtctgtgaatggctgaactcagaacaaggcttttgcaatctgcgccttctgaatacagtttttgttctgttggtttaatttgcatttggtgtctggagtgcctggtcatggaaagagcccgttctttgttttgggtaatgagggctgaggtttccaataagtatttctcggttccgtccgtgtcgagtgtcatttgagtagcaagtgactgttgctcattgcactgggcctgcgagcctccatttgcacattagatttttgcataccctgcaattagtaaattacagaatgacatcatgaaatagaaaactgtattcccagatggaaatgctttccgtattctatgcatttttattcaaaggcagatgcatttgtaaacctctttggatggttgttctgcccttgtcagttacttcatagcaaatgtcaactgtaaaccaagagagagaatgagccaggatggagaacttttttttgtttaattgtgtcatgttgggtgctttttggaaagtgggtgaattattcatgatgacatgaatgggggtattattttaaattagtatagaagcaaatggttcacaacccatttattaagaccctaatgttgatgtggctaccaagaagctttaccagcaagggccagtgtgttgccttccttggttggttagtttttctacatccacttaactcctagcctaattttatcttttttttcctctgtttttctttccctgaatgtttttttaagctctgataaatcattttgaattaaggtcgggtatgtatttcctttcttctcatcttcttccccctccatgactgcctgcatttgaatacatttccattgtgtgagaggcagtaatggtacagaggggtggggggtggtgactgcttggtgagctgtggctcacatgtctccagagacacagggcctaggaagactgattaaaaatcaacttttaactactataacggctcactttcctgaaacttgttatgctgtaaccccacctattgaagacataatcagaaccagaaagtgaacaaaattgaccctggaaatatgtggcaaaaattctgtgcaataagtatgataacacttttctttcagtgaattctctctcagggcccactcacagaaccaattttgacatcaaattttcttccttttaaaaatacagttaacccccacccccatctgcaggttctccctctgcagattcaaccaactgcagattgaagatattcagaaatttagaaaaatgaaaaataacaatataacaaaaagtaatgcaaataacgcagtatcacatctatttatgtagcacttgtgttgtattaggtattatatgtaatctagagatgatttaaagtatatgagagggtgtgtgtaggttatatgcaaatcctataccattttatgtcagagacttgaggatctgtgaattttagtatcctcaggtgtcctggaactactccaccatcaatgctgagggacaactgtatataatataaaataaataaaatatgtactgtaaaattgtaatcttgaaagtttgatcctgtggcagctgctattttcaggcagctcagcctttgtttgcatgctcaaaaccagcttgtgatttggtttctaagatcacggctggcttattatctgtgctggcttatcatgacagtggctcggtgttatggacacagtgagcatttggtgtcgatactcccagaatgaactgagtagaatggacaggagactgacctttgtctatttgtctatgtagcagtaatgccactaacttgttgcagtgctctttatcctcaaactatttgctatatatagtaatgcttaaattacatatattatatatattacatatacatattatatatgtggatatattatatattatatataatatatataattatatattatatagatgattctgactttgcacagttctgatatgcatgagttgcaattaccatgatttaaataataccagttccccaacaactctagtcaaatctcagttacccccgtgtgttaattgagtaattgcatgaagtacacaagcttgctgctagtgcttcagtatacaactcaccatgtaaataacagatgcatgtcagaatccgtggccaatcacagcacttctttcaaagcccatgggtgattggtcagtgcacatgttccttagttcatgcacagacagcagagtgtgtagttctgtggccttcttggctattggggataaaccagtgtgacattttacaaaaataccaaaaatcgagagggaattggtgaacgaagataaaagtgcagcaaagaagctgaaagtgataatgctagaagtgaaaccaaaacctacatggaattatagaagaaatagctgactgtgggaatattggcagtacagctgttggagagactgcctgcgcagcccgaggaggagaatgcaggtttaccacataaacaaggaaagtggttgtgaagaaaagaataaagctgtcctagaggacatgaccttggcaaaacaaacaaatttcacattaaaggatctctcagaaccatttcccagcatagaaaatgcaaaggatgaaatgtatgcttattcaaacttacggctcctagcagcactgttcacaatagtggaaaggtagaaacagcccagttatccatcagtgggtgaatagattaacaaatggatgaatagattaaaaaacagattgtggtatatccacgcactggaatattgatttaaaaagggacgaagtactgatacctgctacaatgcggatgaacctgaaagataccatgctaagcgaaagaagccagatacaaaggtcacatatgataaggttctatttatatgaacgatcttggtaaatctgtagagaaagaacacagatttgtggtttggtttctaagatcacagcaagcttatctctaagatcggggctggggcgcggtagggaaatgaggaacaactgcttaatggatgtggagattccttctggggcgacagaaaatgttttgcaaccacgcggacgtggtggttgtatgacattgtgaatgtactaaatgcgcttaattgtttactttaaaatggtgatgttatatgaatttcacctcgattttaaaaatgtgacatttcaccaagtcatagaaaagatgcttcgcttgtataagttatgcaacaaaaagataagcacttttaaacatttcttgataagttttttgtttccagggttttaaatggcaatgtgctgaatatttcactatttttcacttccttgtacatttataactgacagtaatagagtttttaatgctttgacaaaatttttaagaagtcacagaacaattgcattttttccttttcatcactaacattgttttgcaccgtttcagcttctatggacattcttatggtttcatactgagtactgcctgtgcacatgtatttcactacacccccgccccccaaccaacccctccaccccccaaacacatcccatacccattacagcacgttgttgcagggaggattctgagatgcgtcttctacaatagaaaaagatgtgctgggcttgctgtgaaaaagcagaggaagttagaggtgggatattagcggtgaagttggtagaacctcagctgcttctagggaagagggaaggtaaagtcagcaggtattagggaccaggggaagcctgtaacttataaggtatggtaactatcagagcagtttgtgggattggctagcagctgtgtggccagtagctggaagaaccagtggtctggacatgtcctagttttgggaaatctgtcggcaaggagagcgctaggactgaaggtacgatgcctgaagcccagaaacgcataatgggctgtgacaatgctgtttcacttgagctcatcggatgctttcgaggattcaattcatatctccctgttctccctgcattttgacacaggccgtgcttgcatggcagttgggttagtgtattcccctctccaccagagacttgggagggtaggggagtgtgccttagtcattcttgagactcctgtgcctggcagtgcctagcaacggcttaataaatacttgctaatgaacctaattattatgacattaagattttaatctaaatcttctaaatgactatgggaatctgtttatttttgcttaggatcattggtaatgttttctggccaaagctgcttttttgtctgagctgtgtgtttatttttcattcccgtctcttatttatattgtgaaaatgattaagaaaaataggtggtatggctcatggtctgatatcacgagtcaatgtgttgttttgaagccaactccacacataatggttcaagccctctgactacatcttagttttactccagattttctccatcaatgttgcttgcatttttcagtggtactttttggaaggaaagaatacgaaagccagcccgcaaaagatcactgggtgggggtcatagtctgtgatggtgactgaattatctggtaaagcatatttttgccgttttcagggtcaggcttcagcataatgagattccagaaattgttatgaaaaaagaaaccttaggttacccagcagctaaatgattactgcatcagctagcagctccggaatggccatttggccctgtagaaagatcattcttgggcaggctgttgatgtggagagtgagaggagcagctgttctttcacctgaggccccatctgggtagcagatggtccccagctaggcacaagccctgtgtagggacatccgtgctgcccaggatcctgggacactgcccaaatcaactgttaggctgggagcctgtgtccagaactgtggatggcattcactttgggttgtggaagttggtttgtacctactcttaagtcttgccccttcaactccagctcaggctttttaaccctagtagaagctttcttatctgtaggtatttaagataagtttgaacctactggtctgtgggaaggtaccgaaaaagccaaaagctgcagctcctggggagcttacaggctcccccttgttgagagtctcccgagtgctaggtactgtgggtttaagggagaccctgcagtggtcaaaaggctgcctggtgaaggggggccggttcccatacttctcagatgtgcctttgggcaagccacttgcctcctggtgcttctcttttgtcatctgttaaaggggttagtgaaggacccttctcatagggttgttatgaagattaaatgatttaaagtatgcagagtgctaagaacagtgcctggcagatgattaaaaaaattgttacagaaatacagtacaataacatttttggtcacatttaatcctcaaagcaatcatgcagaaagggcaattgtcatacctattttgcatgagagactcaaccactcgcccaaagtcacagtgctagaaaggacttgagccaggatctgaacctgtcccctgaaatcttcacctgctttgcttcttgacacgggcaggagaatgatgaggaagtgggttagtctgctagggctgctgtaacaactgcagatggggtggccaaaacctcagacatttatttatttttttaatataatcttggatgttggaagtcgaagatcaaagtgttgacaggcgtgggttcttctgagacatccctccttggcttgcaattggtcaccttcttgcttcttcacatggtcctccttctgtgtgtgactgtgtccaaatttcctttctgtaaggacacagccatattggattaggcccaccctattgacctcatcttaacttatttactcctttaaaaaccctgactccttatacagtcacactccgaggtactggggattaggatttcaatgtatgaattttggaggtgagaggacacaattcagccaataccagtaaatgattagtaatcaaacacagggattgaatacgcagatattaaggattggaatgaagccagaatttggaaggattagaactgatggaggcaggtgcttggtctgggtgatttttgaaaatgattttcaggccaggtgaggtggctgattcctgtaatcccagcacttttggaggccgaggctggcagatcacttgaggccaggagtttgagaccagtctgggtaacatggcaaaaccctgtctctacaaaaattacaaaatatcagccagaagtggtggcttgtgcctgtaggcccagctcctctggaggctgaggtgggaggatcactggagcctgggaagtcaagtctgcagtgagcaaagatctgtgcctctgcaccccaagctggacaacagagcaagaccctgtctccagaaaaaaaaaaaaaggctttcaacagagtcagtcgtggacaaagaggaagggacttttttcctcccctgcagctttaacctcccaggctcatatgatcctcccattccggcctcccaagtatttgggactacaggtacgcatgccactatgcccagctgattttttttttgtatttttagtaaagatggggttttgccatcttgcttctgctggtcgtgaactcctgggctcaagcaatcctcctgccttagcctcccaaagtactgggattacaggcatgagccactgcacccagctggaaaggactttttgtgcggtgagaggaggatcctcagaatacggagatctggggtccgcagacccattgtgggatgcacattgatttagtcagatcttgagtgaagagatactgtgttagctgactgcgtgataaacgttagcctgagaaattagtttgttattttgataggcatttgagtcatttattgaactaaaagctttggggtgcctcatgtactaggcacgaaatcacagtacagttcttatcaggggagagatcatttgggtctcagtttcctaaaagtagcttttaactccaaaattgttttaatctatgtttgtagaggaacatcatgaaaatattttgaaattaaacttcttaagtataccttaattttatactgttattattttatttcatttttatgtttattttttgagacaagtttcactgtgtcgcccaggctggagtgcagtggtgcgatctcagctcactgcaacctccgcctcctgggttcaagtgattctcgtgtctcagcctcccgagtagctgggattttaggcatccgccaccacgcccagctaatttttgtatttttagtagagacagggtttcatcatgttggccaggctggtctcaaactcctgagctcaggtgatccacccacctcggccccccgaagtgttgcgattacaggcatgagccaccgtgcccagcctactgttattattttaattagtaaattttggtataatagagactggattttgacttaaggctatctgggtttaaatcctggctctgtcacttaatagctttgtcagatataccatatgacataaataggcagagtttccatcttatcacctgtgaaaagtggataactgtacacatcacattggattgccacatgcagtaatggatgtggaggttctgtccagcattgtgtctttcccatgataggcacttgtgctaatgctatgcaagaaggtagaaagttgaaagtggatagctaaaagtggaggcaaattaagggacttcttaaaatatttttatttaatagaaaacaatatatagcaagaaaatttggatcaattctttcatgcattcaacaattgaagtctgagaaccagccgtgattaggtgctccaaattagaataaggcaaggctcctgccctcattgagcttccaggcaggcgggaagcccaggagggcgtgataagtgctacaattcaggtgtgttcaggttgtcatgcaggtattgaagagggctacttttggatttatgcccgcagaagagtttcacagtttctgaatttttgccccaggatgggagcaggcacttgcattaacatttgaattaatcacccagagaagagtggaaaagttatttcaggcaatggtaacagcatgtgcagaagtctagagggatgggagaggccacatggcatggttggaaaatagcagctcaggaatccatttgctgtgggggtggtaagtggaggactagatttgtgaaaggggacagatcacacaggctttgggaacaactaggaggtttttttttgttttttttttttttttttgagacggagtctcactccatcacccaggctggagtgcagtggcatgatctcggctcactcaacctctgcctcctgggtacaagcaaccctcctgcctcagcctcccaagtagctgggattacaggtgccccccaccacacctggctaattttgtatttttagtagagacggggtttcgccatgttggccaggctggtctctaactcctgacctcgtgacccacctgccttggcctcccaaagtgctaggattacaggcatgagccaccaaacccggctgactaggagatttttaagcagggaagcaatttgatgatatttacagttttaggaagaccaaactgacagcagcttggaggctgatttggaaaggaggcagagtggaaggcagggttgttgaggggggatgttttagaaagattttgtgatgattctgctgagactgaggttctgaacttgggctgccctacagcagcccaggaggacagattgcagagctttgagatagttggcatcaagatgggtgtgtctggggtgggcatgactgggtttctagcttgggtgtccaagtggataaatagcctttcatgtggaggctgagggcatgggcaggttgagtactgtccttcttccccaaaggtagctggccagccatgggagtcaatccacatgggatggaaggatggagaatgccagctcctctttaaagacttggccctgaagaatagagcttgcaattttgtatctagggtagtcattaagatccgttcacacaggtttggatctttaatctccagaatagagggtgggatgctccctgctccattgagcccaggtcatcatgtgacaacctgtgactaattaggcagtgagctgatgagattcgtgtggctcttgagctaagcttttgaagccagggtgagactctctggccctcattatctcagctgtggtgcttggcatgtcccagaaggtagccgtgctgtggacctcagtccccgagggagcgctgtgccacctccacccacgatggacctgccctgagagagaagcctttgttttaggctctttaagatgacatggggattttggtggtgtttttctagcctaatctagcccttcctgactcaagtttttgtgtaagagaccaaaccttgctcattttcttttccttagctacaaatcagttttgaacttaccctttttcagtatatgcctgtgcatgtgtatgcctttgtgcgcaggcagacaaatatagctaggaccaaaagcatttctgctgttaccattatccttttgtccaaggtatttttcaatgaactaaatgtcagaaacacacacgctttcttaaaaaagcagctttattgagatatgattcacataccttacaattcacccatttacagtgtataattcaattacttttattatattcaacgttgtgcaaccatcattatgatgttaatttttttgtttgttcctcttgttgagacagagtctcactgtcgcccaggctggagtggagtggcacaatctcggcttactgcaacctctgcctcctgcgttcaagcaattctcctggctcagcctcccaggtagctaggactacaagctcatgccactacacccagctagtttttgtatttttagtagagacagggtttcatcatattggtcaggctggtcttgaactcctgacctcaggtgatccacctgccttggcctcccaaagtgctgggattacaggtgtgagccactgtgcctggctgatgttaatatttttattacccataggaagcctgtacgatataaccatcaccccccagttctcccacacatccctctccccatccctaggcagcctctaaactactttgtatctctacattttgcctattctggacatttcatataaactgagtcatgccatgtatggttgtttgtgactggcttctttcaattagtggagtgttttccagggtcatcaatgttatagcaggtatcagcacttcattcctttttattggtcaaatactagtctgttgtatgggatacattgtgttataaaaccatatggtttctagagatggaagccatgctgacccctgtagagttttgtttatccatttatcagttgatgaacatttggattgtttctgctttttgcttctatgaacctctatgtagtacattcttgtacaggttttggatgaatatgttttcatttctcttgggtttatacctaggaatggaacttccagactgttttccaaagcagctcaccatttgacattcccccccagcagtgtctgagggttccagtgtatctgcatcctcaacaacacgtgttgtctgtccagtgatagccatcctactgggtgtccctgttgttttatgtcatttaacaccaaacttagatcacatttctgcattactgactttgcacataccgtccccaacttgcaacttatgctgtcattaacttgtgtagatttatccatgtttggctgtttatgaggatttgtccgtgtcaacatgtatgtttcataaggacattcttaccttccattaccagacctacattctcaatttaagatttgatattttttcagtgtttaggttttcaattgaatcaactgacaagtttagtggcttaaactttcaagcttaaactgaaatgccaatcttgttttagaccaaaaattacatcctatctcttctcttaattgaggaacttaggtggtggttcctatttgtctttatttatttatttatttatttatttatttttgcctacttcagtttggtcggtaaactatcaattgtattttcagtatgtatatatatagagagagagatttttaaaattttattattattttttgagacagagtctcactctgatgcctaggctggagtgcagtggtgtgatcttggttcactgcaacctccacctcctgggttcaagtgattctcttgcctctgcctcccaagtagctgggattacaggcatgtgccaccatgcccagctgattttttgtatttttagtagagatggggtttctccatgttggccaggctcatctcgagctcctgagcttaggtgatctgcctgccttggcctcccaaagtgctgggattacaggcatgagccaccatgcctggcccattatatatacatttttaatataatgtgaaatcatgtggtctctactatagactgaatatttgcatcctaaaccccaatgggatggtattaggaggtggggcctttgggacgtgattaggtcctgagggtagagccctcatgaatgggattagtgcccttataagaagaggccaagtgagcttgtttgctccttctaccatgtgaggatacagcaaagaacgtgctttctgtgaaccaggaagtggccctagtcagacactgaatttgccagcaccttgatcttggacttcccagcctccaaacctgtgagaaataagtttcggttatttataaaccacgcagtctgtgatagtttgttagaggaacccaaacttaaaggcagcttctaaaggggagcaatgctgaccactctgtagtttgtatatttggtcaacacactttattgagtgatgagtctgaatttcatgcttgattgatgatgattggtgacagagtagacaaggtccctgcttcatggagtctatggtctagttggggaaatatacctttattgaatcaaggcagatgtgattacagattgaacaatggctgtagaaggaaagggatttccaagagagaattagaggggcttctcaaattgagtttgactttctctttggtgggggttgagtcaggaagaacctttttgaagcaggaaaaatctttagctgagacctaaaggaaggggaggagcttgcctgggaaggacactgtggtggctggagggggtttcccaggcagggacactctggcaggttagagtaactgaaataaagtctgtattggagtgcagagactgccagaagaggggctcatagaggccaaagtgggacggccttacggacgagctgataatttgggcattattcaaggtggggtgctatgtcattgaagggttttagcagaggggaggcattatccaagttaaagaacaaaacaaaacaaaacccactctagttgctgtgtggcagatggattgggattgggggtgtggggttggtggcaagaatagatgcagggggacaagttatgaactgagactgggacctcatgggtcttcctgcccaagaccgagatggctgggggtgggggctgcagctagggacatggggcctcagtgcccacgttttctgtcctctgtcccctgtgagggtatgtgcgctctcataccagccgccgggcactttggctcgcttgtgttgctgggagagatctcctttaatgtttttttgtgtttttaaaatatgaacgtaggccctggcagagacaaggcagaaaccacttttgagtttttagggccgtgcattcttaaacaactctgagtgacccttccatcattacaatttatcaactaaattagaaaacgtgctttcacagatttctagtacttgggcaaatttgttatttacgctcaagatgaagtgttgcttctagtgacagttttgctgttgggcagcatttgtagggtaaaggtgtttttgcttttggaatccattgggagatttaaaaaaaaaatatatatatatacacacacacacacacacacatacacacatataaagtaaaaagcaggaagtctatgtgtgtgccaggggatcccaaactcttggcctccagcagtcaagagattttttaaaacctttatcttttaccgtcttgctttttaaaatccattatgtctttgtatagtacttgacatacatgggcagaagtcatgctggaacgtgaagatgggagcatggactttctggagcatcccaggtggggttcctgtggctgctgtaaggcaggaccgcagagcggtggctgcagacagcacggatttgctattatatctcatagtcctgtagggtagagtctaacatgggctaaactcaaggtgtcgccagggctgtgttcctcccggaggctctaggagaggatccccttgcctttcccagtttctgcaggacatctagcagcctcagctcattgtcccctccctgcgtttgcaaagccagcagagtagcatctctgtggccattcccacatggtcacatctcctcctgggatgctctccttctgcctccctttgcactttcaggagcccttgtgattccattgtgtccatctggataatccaggataatctccctattttaaggtctgctgattagcaactttaattccatctgcagccttaatcccccttttctgtgtaagctgacctagtcacaggttctggggattaggactcgcgcatcttgggggaccgtcattccacctgcggcagtggtaggctaaaccttaggcgtctgatattgtgaacctggctcactggcctttgtcttcttgccgactcctattggtatttgcctgagatgtttttcttttctttttcattcttttttcttttctttctttctttcttttttttttttttttctggttctgggcccacagtaggtgccttagaatcatgcagtccagttgccttctgggaatccattgtagtaagtggtagaggtttttaaagcagtcctaggggagatgcaattccctgcttacattcaagtttttcgggaagacaagtctgtttaggaaacataggaggttagttgcattttcctcattaatgcaggatattaaaatattcagagggaacccaggagtcctctcaagatgagtttaaatttctcatacttgtagaagttgttgagaaacactggattctaatttccagaactctggtggggaaggagactgtgaacctggtctgaattgagaatggggattgaggatttttggacttttgaaagattgacttactctctcccgttagttctgttgaactgctgcctaaatggagggaatgtgcatcctgtcttgtgttgtgtggcaatgcagtggggacacttgggacatgagcaaaacgttgacagaggggagcacttcctggaatattattaatacagagttagttttaacttcaccttttgggcaaacttgacattatagatcttgaaataggattatttttcccttgctaagaggttagcaaaatcagtacagtgtgtctctttgacaggccctagaaagcactctacgtttgttaactttaaatttgggtcggaaattgatgttattggaggagcaaggcgtgtttaggcctgatgatttttggatagcttgaccaaacccggtacagccaactttcccccaaaactactgtgtccttctcagtggttcctgtgcctgcacagggacccagcgcacaccccagtgtgcctctttgggctctggctaacttaggctgacatcctgatagaacgcagtgaccacctggtcatttgattacagcgcttcttccagacagcacgctcagaattgcgtttcttacttccagtcttcttgccctgtaagcattttctgtgagtcaccaaatcaaacacaaaatcatataattttatggaagtggaaaatcagacttattaaaatactgtgtttttgttttaaagctcagaggtatagagatccatgaatttttttccatgccttctcataatgtggttttggtttagctgcggttcttccaggcgcagatgtcagccctctgcagatctgctgcatcagaatttatggcctgggtcttaggaatttgcaatttaaaataaccccttcaggtgcgtctaatgcagcctaaatttggggccagctcatgggttgtaaactgtactgccctatacaatagtagcacagttctaggctcaagggactcaagggggtccagtaagtacagttcaccagagaaataacaaaagcattagcagagggagaccagagcatcatctttgttagggcaaaggcttaacatagaggaatgtggcttctatgtccaggccagtgggcttcctaacacagaacatggaattaggcagacttaacatcccccatgcccaccccggtgagtgccagcatgggcttgagctgctcttcacactgatggtccatcctttggactgatctccttgtgaaggatacaatacagcaaggagcgggggcttggcttggcacagccagttctttacccaaactcctgccaacgctggcccttctttcttaccctggttggagtgtgtgagggtgggagaggcaggaggaatatgctggacagagcttcttccatctagaagggaatttcaggagtaagaaagcagcagctcttaacatacctgggagaaagcaagtgcttagtaaacagttgaggaatgaactaagaattttcagacagattttcctcttctggagcatttgcagaaccgcctctttgctcaagtgctttgttttttacagattcatttaaggtcatggttccagacactaatgtaaatcagcacatatattattgaagaagtagaatacctccaggcccagttgccttggagcaggaaaaacagttcatcctcattaccatccagaataatttatgttcaagataatacacaatcaatttactttttatcatattcaaatttgatttgtgtacacttttgagtttggatgtcagccacattgcttctgtgtgttaatctttatttacgggaataaatgggaagcagtcagccattttttattctttattggggaactgcattatagtggaaaaggtaaaattataagctaatgagaccagaggtctgtatgtatgaaaaccgtcctcatcgcttcacagttgtctttgaaccagtttccctgggattgttcgaaatgtagcaaacgtggctcacggttaccctgacggggccagagcaatagggggaggtgtgggcacctgtatacatttgcgttgaaaaacgtacccgggctattctgaggtcctttcctgcccccagcctggtttctgggcctctctggagtctctctttctggcacttgtgttctggaatcgcttatcagcctggactccttcagcagcagctgccacagtgtctttgtagtcacactacacacctatatactccatgacatggagcgtatagaatgtttcccgtcttcctcgtcagtgctgccaggagaagcttcccctctcctaacctctggatagtggctggctctgctttattcaggcattgctttcattttttagaacagctgctccagtatgcttagtgtgaatgacagcccagcagaaagaatggacttgacactggacactgcaccactccacatttctttgtcccctcaagatgacttaactagctcccttcccttttccttcatgcaatagcctcagaagttcggctggcattgccaagttgttagagtgaaccttaacctgtgtatgactcagaattcacatctgctgtgtcagtgaacacacagatctctttgtgaacacatggttatcaagaggcacatgctcttacgtatcctgccggattctggtaaggcgctgcttgcgcagtaagcacttgtcaggtgcttatgatgcctgtgacgtgaggctgtggatgcagaatttgtggtctgaacatttttgagtagataaaaatggaaactgaaattggtgaagcagacttgtggcttttcctattttctcatctcttttatggatataactagaagctctgcttcatcaatgagtgtgttaaaacaatttgtttacaaaatcctatttattaaaataaaaatctgaaagaactgcgctgctgcttttcagtgctcgccactctaggaacctgtattcctcctcttgttcatcctcccttttcttcttttttgttttgttgttgtttgtgtgtatgtatgtgtctgtgtgtgtgtggcggggtggtgggggcggtgttgccaaatcttttgcactgaatctttgaagatgtcctgaaatacttaccaaatcactagagcgaagagaagcccatctgatttcttcatctcccagctgaggaaggacacactttctcccactctccagtgaaggcccctgtgtcctgtgggtgggggagctgacatcacactcagtgctgacatttcttgttccctgggtgggcgctgattccagatcctcttcagccccccaagcggaactgggtttctcttgaaggtcctaacctcagctcacaccacctgctactacctttctgggtcttggattttgttgttacccaggcccggggtcatcccaaaggctcttgatagccctgtggctgtgcttgctaatacactgtcctcatcttttgtcagcgaagtaaatccaataatgtttccttctctttaatccaagccagtcttcattgaaaacacttcacctctaagctctcaggctctgcagtctgccctctccaaccttacccctcatgccccaccttccctttgtccccatctttcccttctgttccagtcattctcatgggccatggagagtggaagcctgggagggctttgccaaagtccagttgcctgctcactttcctaagggccagagcaatgggggaggtgggggaggtgtgggcatctgtatacatttgtgttgaaaaaggtacccaggctattctgaggtccttttctgcccccagcctggtttctgggcctccctggagtctctctttctggcatttgtgttctggaatcgcttatcagcctggactccttcatcagcagctgccacagtgtctttgcagtcacactacacacctttaccccgatccactgacctgctgtcccggatggccctggtgtgttctctctgttcctagccgcagaaattgctggtgaatgtcaccaagctaagcggtgtagctttataacaagtggattcagccagctggggctggacgactgagagtttgcagcccctgctggaccctgtgtaactgtccagtttgcctagctattggtttggcccagtggttttcaattttggctgcacatcagaatcacctgggggaggtttaaaaccctacctctgcccccatgccctggggttcacacccagaaatgctgacttcattggtcgggggctggcaggcctggacattggcggtttgcttagaagctgcctgggtggttctcatagcagccagggtcaagcaccacggcctgttcttacctggctccccaggccccctttaatctccctctgcagcagattggcacacatcgcattgtggagcaagccatctgataattttccttaatcgtctttgaagatcttccctctgcctgttgatcctttaaggaagaagtctccttgccaggatcggcctctccagtctctggatcccttcttgcttgctctcttcagaacccatgaaacctctctggctgccttgacgtcagccagattggactgcccaaatagaaaggcagaaatccctgtcgaggccagacagcaaggatggagaggggcagggggtgaaatgaaacgcaccaggaggagtaaagacaaggccttctgatgtcagccaagagcaggtgtggattaggcagtcctaagtttgagtcctggttctgctattcattggccaattgtattctccctccctctacgatgaggttaattacagttacctcactgggatttgtgaggatggaatgaggtaacaaaacataaaatactatcagtacaatgcccagctcataatgagtatgcagcaaatgttcaccctttaaaaaatgccacggccgggcgtggtggctcgcgcctgtaatcccagcacgttgggaggctgaggcgggcggatcacgaggtcaggagatcgagaccatcctggctaacacagtgaaaccccgtctctactaaaaatacaaaaaaattagccaggcgtggtggcgggagcctgtagtcccagctactcgggaggttgaggcaggagaatggcatgaacccgggaggcggagcttgcggtgagccgagatcacgccactgcactccaacctgggtgacagagcaagactccatctcaaaaaaaagaaaaaaagtccctttctaccttcaaattcaggaaaattttctttagtccaacagatgtaatccccccctcactcccccatccccactggtatctttatgtactcaggtgactattaccatattctgcttggactgtttttatacattgcagataatttgaagatatggatttaggtaggtttttagatttataataattaagtgatgtttttctatcaagtgatgaaagtttcaacagatatttgttaaaatttaatttagccaaaggaagacatgccatttcagcaatgtgatctaagtaaaagtgtcttctcttttttttggtggggagaacagagtgtagaatgatattagtaagatagagaattgatgaccaaaccataactgctagcattttagtagaggacacaacagagaaaggattctcacgtgtgttattaggatcttggatgagagtgggctgttattttaactttggcccctgttggagcaaattactctttgggggcccggttttcctcaggaactacctacagaattcagtgagatagattttagaacccttctgaatgctgctggtttggagattctgtctgtagcaagttttgttcagttgttaatctttctttcttttctttcattctttttttttttgacagggtctctctatcacccaggctggagcagtggtgtggccctggctcactgcaggctcaagcgctccttccacttcaactgcccaagtagttagaaccacaggcgagttccactacagctggctaattaacaaaaattttttttgtagagatgaggtctcactgtgttgcccaggctggtctcaaactcctgggctcaagtcatcatcctgtgttggctttcgaaagtgctgggattgcaggcatgagccaccacacctggccaactatatgttttctatgtttattatattttctgatttgtaatgtattttaaaattatcccaataatatatgaatgcaatcttgaaaaatactcagcatagcctttaggctaaaaagtggaggtctgccatttctctgccttgccccattcccttcccatgtcttattttccctgttaccaggttggtgtgaagcctttgagacctttttctctgcacacccatatatgtgttttttctatgtttttatagtattgtttcatttaaaaaataaactaggtttttgaacttgagaaatttcaactcgttctgctcagagctttgttttattaaaatcagtgcctgggagttgctcaagtctttgggctgtgtcgccctctagtggtagccctttggcttacagctgccattcagccctagggctggggtggaagtgatggttttgtgcccacaacctgatggcagggttggcagtgtttagttgctgacaagtgtctaaaactcaatctaggccgggtgctgtggctcacgcctgtaatcccagcactttgggaggccaaggcgggtggatcacctgaggtcaggagttcgagaccagtctggccaacacggtgaaaccccgtctctactaaaaatacaaaaattagccgggtgtggtggcgggcgcctgtaattccagctactcaggaggctgaggcaggagaatagcttgaacccaggaggaggttccagtgagccgaaattgcgccattgcactccagcctgggcaacaagagcaaaattctgtctaaaataaaataaaataaaataaaatataaaagtctggtgagccctggagtggtgtttgccttgctacctccaacttgccctttttaagagacttaaaatttgtggtaacttttcacatgatgtgtatttagatactgctgagttaatgaggctgctatacctggctgatttattgtttgctttcaaagcagttgtcaagtggtgtccacccatcccactgatggattttttttcttttttctttttcttttttttttgagacagagtcttgctctgttgcccagactggagtgcaatggcatgatctcggctcactgcagtgtctgcctcccaagttcaagcaattctcctgcctcagccccctgagtagggattacaggtgtgtgccaccacgcctggctcatttttgtatttttagcagagatggagtttcaccatgatggccaggctagtctcgaactcctgacctcaagtgatccacccacttcagccccccagagtgctgggattacaggtgtgagccactgcacctggccccactgactgtttatatctgttatactgttcttgcctctgtgccttttgggttccctgtcatggcagcatccttacatcctccaccacctctgaatgttcccgcaccttctctttctaatggaagcctggctggcccttgaagacaccgccaaccctgctggtctcttcacagagtatccacccagcaacctggcctgtccattcttgacttcttctggtccagctgcctttctgtacctcattttagtgaccctttttagatctcgtccaggttagcctctagaaccctgatctcaggcaccccactctgcgatcttccgttcccagccttcccacttgaaatcgtcttggaaatcccgggctttgccaatctgtggacccaccaccttttcaccccctttccggtgccctcaggggactttgctgtagcctgaacctcatggtcccttcctgtaaacagccaaactgctttgtactccctgaggagacccccgccccggttggacaccccaccctggttaaacccactttcacaattattccaaaactgccaactggacttgcatctcttcagatcggctgtcatcactcattgtatcaggaatcttattacacttttgcagcagtttcatcggttcagagaaaactctttcataccttctgctcatcagttctccacacctcccatcattctcctagctgatgactttgctgcttgtctcattgaggaaagaagccgttcagtcagtgagaccccctgtctcgcctccacctttccacctgctgccgcggaggcttccccagctcctgtctcactcaggccccttgccactctcaaggcatcttcttcctgcttcccaaggatgtcactcctgcagttaaccctttttcctcctgcattattcgtttcttcctttcttccgcatccttccaaatagcgtaaaaacaggccttatgacgtttctctttaaaaatgtccttaccagtgccacgtccctcttggccactgcccctgttgtgcctcactccgtagaaagaagtgacctgtagagactatatcctgccctctccagcgcctgccttccgattgccccttccagtctagtaactgtgtccattccttctccaatgaccgggtgacaagctgtcccttctgagagtgccagagggtgttccccgggtgggaggccggatgtcagtgccagctgtgctgtcctgggtgagcctgtgagggaccacatctggtcagactcgtgcatggcctgccctcatcttcctccgcctgcggtgcctttgagagcattgactccactaagcccgatttctgtgtggcatgttgtctgttcctccccggcctcctcgatggctcctccttggtctccctctggctactcctctgcttctccgcctccaagtgctgctccaagtgccttctgtgctctgtctccatccagcccaaaccttccaacactctctgtaagtggaatctcaccttgaggctgccagcccagcctcctcacctctgtgctccatctttagagagtcacctctctgtctggcattcccacttgaggaccaagatgattctcaaccttaacgtggcccacatggagccgctgctcttcctgcccagatctgccttcaccaccacatcctgcccactgtcactaaacggcaccagctcttacctggtttctcagtaaaaaaacaagtttatcatcttccctcacatactttattcaataataatcactaacatttattgagtgcttcctatgtgcctgacaccattctaagcatttgaagaagagtgtattaacctgcatgagaaaggctattaaaacctatgtaattaattaattaatggatggatgtgtggatgaatgaatggcagggtcttacactgtcacccaagctggagtgcagtggtccaatcatagctcactgcagcgtcagactcctgggttcaggcagtcctcccacctcacccttttgagtagctgggactacaggtgcttgccaccagctaatttattaaaaaacattttgagagatggggtttcatgatgttgccaaagctggtctcgaactcatggcctcaagcgatcctcccactttgacttatagattgtggggattagaggtgtgaggcatcgcgcctggcctgtaataacctatttgtgaatgagaaaggtcaggcacagagaagttaaataatttgctcacagaaatttcctgtgttgcagctgagatttaaatccaagcaatgtgtttctaagcctgggctcttaactgtaacactgtcctcttccccccaccaggagggtgtgtgtgtgtgtgtgtgtgtgtgtgtttctgaatctgaccagttgaggcaggctttcatgtcattctctctggccacccccttctttgttcacctccagtctttggaatagtcagagcgatgtgttcatggtagaaatgaaatcacatcaggtcctcagtggcccatcacatttagaactaaagctcacccttgcctcatgcctctgagcccttatatgatctcgagtcaccaccccactgccagcctctccactctcttctctgtgcctcatgcagcccaggaaatataatttggaccgcaaatgccagccacctatgtacggtaacttttctagtagtcacattaaaaagaaaacaggtgaaatgaattttaatgcattttagttaactcatgatatcaaaaatatttcaacatgtaatcagtattcacacaaagattaatcaagtatttaacagtcttttcttttgatccggggtcttggaagtttgacttaccacctctcaatttagccagccacatctccagtacttggcagctgtttgtggctacctcatggacagggcaggtcccgccacccgggcatccgtctgcctggcgcacgcaccaaacgggttccagtctggggaagttggcatctgctgttgttacttttggtcagaacgcccttcgcctgcgtcctcacggggctgactccctttagccttgaaggggaccgttgctccgagaggcctgaacactccagctgcagctttctccccagtcattattgagatcaaattcacatctcttacaattcacccatttaatgggtgatgcaatgcggtggcttttagtatattcacacacatgtgcagacatcaccatagccaattttagaaaattttcatcagctgaaagagaaaccttgtatcctttagctatgactttgtgattccctgttcccctgagcccctggagaaccctatctttctgtctctgtaggtgtgctgattctgaatattttgcataaacggaatcatactagggggtcttttgcttgggacccctttcacgtggcgtgtttccacggcccatcccgtgtgatagcatgcatcagtacttcattcctttttatggcagataatagcccattgtatggatataccacctgtttttttaaaaagtccattcatcaattcatgagcatttggtttgtttctactttttggtagaatgatgctgccatgaacacttgtgtgcaggtttttgtgtggacatagacttaggaatggaataaccatggagttacggtaactctacatttaagcatttgagaagctgctggcctgtttttcatctgcaccatttgcattcccaccagcatcgagtgggagctccagtctctccatatcctccccagcagtcggttacccttttctgttgcctctgtagcactttctaaacataaaattagcttatttctttgcaggtgtctattgcaccccccaggaatgtcagttccctgcagactctcactctgccttggcacccgcaccccagcacccaggggtgaggtgcctgcctgggcagccctgtcctcacctggggttgactgaccagagaacccttgcgattctctctctgggtttctgtctgcattcctgtcgggataggtgagactggggtgacggctgctcgcggcttggtcaccttcttctctgcttacctgttcatgctctcttgcttttctcggatagcaaaccccgtctcctgtcatcctccctcctggcggaccagagctatactggcccataaaggagtgctggccacaccaggctagattccagttgagcttaaataaaacaaatagaaaggtcctccgtggtattagccatattgtaggtgctccgtagacacatgcggctagtggctgcccacaggacgctgcagatgtggacgtccccgtcatcacaggacgacattctgtgggcagcgctgtatttgtttacaaacacaattctttggctgtgtgaaggttcaggatgatacctttgccattatgattcatttattcatttcaggctggacacggtggcccacacctgtaatctccacactgggaggccgaggcgggaagatcgcttgaggccaggagtttgggaccagcctgggcaacatggcgaaacctcacctttatttaaaaaaaaaaaaatcggccgggtgcggtggctcacacctgtgatcccagcactttgggaggccgaggcaggcggatcacgaggtcaggagattgagaccatcctggcctaacacagtgaaaccccatctctactaaaaaataccaaaaattagctgggcgtggtggcaggtgcttgtagtcccagctactcaggaggctgaggcaggagaatggtgtgaacacgggaggcggagtttgcagtgagcggacatagtgccactgcactccagcctgggccacagagtgagactccgtctcaaaaaaaaaaaaaaaaaaaagaatcaacatttatttatttattatttatttttttgagacagagtcctgctttgtcaccgaggctggcacgatcttggctcactgcaaaccccacctcccagttcaagtgattcttgtgcctcagcccagtgccaccatgcccggctaatttttttgttttgttttgttttgttttgctttgctttcctttgttttgttttgtttgagacagggtctcactctgtcgcccaggctggagtgcaatggcacgatctcggctcactgcaacctccacctcctgggttctagtgattctcctgcctcagcctcccaagtggctgggactacaggctcccgccactgcacccggctcatttttgtatttttagtagagatggggtttcaccacattggccaggctggtctctaactcctggcctcaggtgatccacccgcctcggcctcccagcgtgctcatttatttattttagcatcccttcttgtgcctggttgtaaagttcttcttatcccaggaaacttaataggtcaaagaaccctccccttgaggcagtttggatggggctggctgggaattggtatgtccagctgcccatatcgtggcctctgagtcaattatacaggcatctcggcaacttgaagttttgagtcccaaaacaacagattccatagcataaacagtgcaacgtaaatcctgtcccttgtccctcttccattggatacccttgtttatgttctctctggcaactgcctgtagcagggacggatgctggaaatcctggcggggccacgtcttctgtgctttgtaggcagctatggctggatggtgcttgctgtttctgtgtgtaaatgttgggatttttaaaagcccttccctgcttaatgcgttgtggttgagcagcacatttaaatgcctgaagtgtaagatgaagtctcttggatgtagagggcagtggtggtttttatttttcctggttgaacttggcctttggattgctgactgcgagctcacggtactgttaatgattttctacctacagtcacctgctgtgctgagcacatcaaatacagtgcggttagttccaagctatgaagcgcctgtcacgcatgtataacaggcagacctcattaggagggggccttgcataggggtcacattttccagcatttgttttcaaaatggaaatccagatcacgcatttgagattaaaataaaaaaagcggcctgtgctttatcattttctttaacttacatgcctgctggtccagcccagattgctgatagaggaagccctgagaaagttgcccagccagttgcccgtgcttcaagacacaaagggctgactgaggcatccgtgcctacccttggctgctgctgctcagcctgcttgcatctcgtctgttttcagttatcagtggtgtgagaaaaacacaacggtggattcagaaggagaaaccaagtcatctgcatttggcctcagtgtgtggactgtcctgaaatttgagtacagatgtgttcatgtcctgggattagataaaaagagaggaaacacacagtgaattcttatggtctgtcatttcagttggccatcttctgcccctctgttctggaagcttctccactaaaatagagcacccaacttggttttctacttgctttctggcccatcttgagttggaggaatcatgtgtttcagaactcttgctggtggtgggtgggagatcaacaaatgatttcattaagctgtgtgttcttaataaactttgggaagatttgtcgcagagaaactcagatagggaccttgtgatctcagcagtcatgggtttatcttgtccacacgcgtggcttcattgggatttggttggttgcgatccagcagaactgtggcggtgttgggctctgttggggtttggttgtgagcggaactgtggtgttgggctctgttggggtttggttgactgtgatctagtggaactgtggtggtgttgggctctgttggggtttggttgactgtgatctagtggaactgtggctgtgttgggctctggagtttggttgtgatctagtggaactgtggcggtgttgggctctgttggggtttggttgactgtgatctagtggaactgtggcggtgttgggctctgttggggtttggttgactgtgatctagttgaactgtggctatgttgggctctgttggaatatggctgtgatctagtggaactgtggcggtgttgggctctgttggggtttggttgactgtgatctagcggaactgtggctgtgttgggctctgttggaatttggctgtgatctagcggaactgtggcggtgttgggctctgttggggtttggttgactgtgatctagtggaactgtggctgtgttgggctctggagtttggttgtgatctagtggaactgtggcagtgttgggctctgttggggtttggttgtgagtggaactgtggtgtcgggctctgttggggtttggttgactgtgatctagcggaactgtggctgtgttgggctctgttggggtttggttgactgtgatctagcggaactgtggctgtgttgggctctgttggggtttggttgtgatctagcggaactgtggcggtgttgggctctgttggggtttggttgtgatctagcggaactgtggcggtgttgggctctgttggggtttggttgtgatctagcggaactgtggcggtgttgggctctgttggggtttggttgactgtgatctagcagaactgtggcggtgttgggctctgttggggtttggttgactgtgatctagcagaacagtggcggtgttgggctctgttggggtttggctgtgatctagtggaactgtggcagtgttgggctctggatttggttggttgtgatctagcggaactgtggcagtgttgggctctggatttggttggttgtgatctagcagaactgtggtagtgttggcctttgttgggatttggttggttgtgatctagtggaactgtggtggtgttgggctctgttggggtttggttgtgatctagcggaactgtggtggtgttgggctctgttggggtttggttgtgatctagcagaactgtggtggtgttgggctctgttggggtttggttgactgtgatctagcagaacagtggcggtgttgggctctgttggggtttggctgtgatctagtggaactgtggcagtgttgggctctggatttggttggttgtgatctagcggaactgtggcagtgttgggctctggatttggttggttgtgatctagcggaactgtggtagtgttggcctttgttgggatttggttggttgtgatctagcggaactgtggtggtgttgggctctgttggggtttggttgtgatctagtggaactgtggcggtgttgggctctgtgggtttggttgtgatctagcagaacagtggcggttttgggctctgttgggatttgcctctgatctagcagaactgtggtggtgttgggctctgttggggtttggttgtgatctagcggaactgtggtggtgttgggctctcttggggtttggttgtgatctagcagaactgtggtggtgttgggctctgttggggtttggctgtgatctagtggaactgtggtggtgttgggctctgttggggtttggttgtgatctagcagaactgtggcggttttgggctctgttggatttggttggttgtgatctagcggaactgtggcagtgttggcctttgttggaatttggttggttgtgatctagctgaactgtgatggtgttgagctctgttggggtttggttgtgatctagtggaactgtggcagtgttgggctctgttggggtttggttgtgatctagttgaactgtggtggtggatcccaggagctgctgctgcttgtgcgcttcaaagttggattttgtgtttttttgtgtgcagatgcttcttggaatcttgcgttgctgtatgcctgtatacctggaaagttgtgggaagaacagtttaggattttgaaccaattttctcaacaagtttgattatttcatttgagacatgttctgatgtaaatatattctgaaaaggtgagatcaaacatccactttttactctaaagcaggtccccttgctcctctctgctagtgcattctctttcctttacagctccttctcctttctgaagcaggaattaagctgaagtaactcagaaagtgccagcgttaaccccaggggacagaaaccacagacccagggctgagggattgagtttttaatttccattattctccatcagtgcgttcagtcttttgaacttaccctgactggtattatcacttgaaagttgttgttattgttgttttgatggtagtggtggtggttttttgccacccacaggagagaggggattagaagaaaaagaccaatggagtttccttgggattaattaaatgtggggctgccacacaggaatgggtccaagggctgctgtatttaaataacttacttattttgcagaggtgaatttaacctaacatgtactacagtgatggagtaaaccttttcctgtttggaatatcacaaaaggtacttcaataattgcggatcttcctttgaaccctcctattgtcagatggggtagtggtacagttccttgttccagaatgctcttagcaagttgattaatctgtcacataccccagtttcctcattcacaaggtggcataataataggacatagagttgccgtgaagtttaatgagttaatgaatgtatgatgcttggcaaatggtaggggctcaagccaaccctcgttgtcttactgagcttagtgggccttggacctgctgaggactttgaactgagcattccgtgttattctcttttttgtttttttaaggggatgagagtgtgtgtgatagagttcatgacaatattttgtttaagaaaattgtcaaaacaaagttcaaatgcaatggatggaaagtgatttttaacatgtagggtaactagagatttgagatcagacaaatcgattaggagatcaccaaacccaaacagagaatgtgagttaactcatacttaggagatgaatgctggctttgaagaccatagcgtgcattttcaaaccagatggagaggccacttttctctgcagatttcagttattcgtgatgttaaatgactcgtcttctcttacttgcctggcatgtggaactgagtaaattctgtcaaaagaactcactgaaggaatgtgtaacagctgggaattggatgtcttttcagatttgggagagcctgtgttttgactgtgatggaattcttatggtttaatatgcttaaatattactgtttaacattttgacgtttttgaggacagggataattaggagaatgcacttataagtttctatgccaactgtttccactgctcccctgtttacatggtcccagggtttatacagggctctctgtagccccacaatgaatcttgccccagtgagcgggctctcacctcccttctatagatgaggttggagctcagaagaacgtagagaaacttgtgcatagttattatgccagatttagcagctggaacaggactggaacctaaatcttttttctttagataatatgttctttgcattaatgagtttgtgggttttttgggaggtgagaaatatgtgtaaataagaagtaaaaatcctaaattgcaagttgattttttttcttaatatagtaatacgtataatgcagcaaacatatcatttcccctccatgcttgctagactggcttatgcacacatcatgatgataatgaaggagctaacatagcaagcactcactctgtgctcattcataaggtggcataataataggacacagagttgccatgaagtttagtgagttaatgaatgtatggggcttggcaaatggtagatgctcaagccagtcctagttgcctttctgagcttaggaatcatggaatcatgctctaaaaacttcatgagtatgagctcgcttcatcctcataacaactctaggagatagacgttactttatgtccattgtagggatgagagtgtgaggtatgaaaggaagtgagcttaatattctttatttttattttttatttttattttttgagatggagtcttgttcactggcccaggctggagtgcagaggcatgatcctggctcaccgcaacctccatctcctgggtttaagtgattctcctgcctcagcctcttgagtagctgggactacaggcgcgtgccacaatgcccagctattttttgtatttttagtagagacggggtttcaccatgttggccaggctggtctcaaactcctggcctcaggtgatccatccgcctcgggctcccaaagtgctggcattacaggcatgagctaccgcacctggcctaatattcttaatttggctgtcggttgtcacccaaatcagttaaagcaattccatttcttaagtgaaaatcagaatttcttttcttttttccccttctattttttcttttaatcttttttcttttgtcttcaagcaattttcatttttttttttttttttgatattcagggaacctgaggcgaatgaaggggaggaacctgggagctactgactgtgattacagtggatattcacaaaggaagacctttagtacagtgtgaagtagtgagggaaagggtgatggagtaggagggatttaagtaaaacctttcaggtttaaggtcaatggaaagcgaaggaacattctagaaggacattagattttccttagagtgacattagagtttctgtaattggactataccctttagtgcctcaaatcaagggtttcacattttcttttttttttttggaattgcctgctcatgtatttccatctccttaaaggcaagggctggccgccttatttggctgatactagcctccatggcatcagcctgtccagtggaagtcctgaaacagtacacgatgaatggataaatgaatgaatgaatgaatgaaatgaatgagggaagaaatgaatattgtgcttccagaacgaggagagaagggacgatgatgtggcaaattggcccagcatcttaagatctgtattgactttagcctcatgtggtagtttaatgatactctctcttactcagggaatgtgccttttaagctgtggtctgtggtcaatgtgtgtgcacatctctgagagtcctggctgtgttgtgtttgtgatggctcccatatgtggtttgcctttgtatctgattgtaaattaaccttgacatgtaggtcacctgaccgtgtatggagagagaaaaatcactttcttcttctctacaagctatgtgagtgcagactgaagttccgagttgtgatctcaagcagtctgcagaaactaacctttggcatacttggccacagccgacttctttctagtaaattcccactggttcttggcttttcttgtagaattaacacatttgcaaagttttcttcattggtattcctggtacgtggactggaatattcttcatcccttgatttgtgggatcgttttgtctttgggccacacttgtcatgggaggaaagtcacagctagactgggtatggaaagaatggaagtgtgtctcctgcagggagagcccaggttattgagacagtcttggcccgtgtttcttgaagaagacgttgggttttgttttgctcattgatggccataccccttgtgtggttggccaggaagctgaacgcttgctcccccttgtggctaaatacaggtggttctgctggcaaacccagtggtcaattactgcatctactaaggattaagaagattataaatgtaaactcagcttgaaactttttgtggcttagaggtaaagcaagaaaataattaagataacaactcacatgctgagggtgtttcatgtgttattattgtggatgttaataacaattttggctctctgtgggaagccatttccttcacttaatcagttggcaaagaaagtacatcagggaagattgttcaccctgagccgagaaagtggagtttcaagtaagaaccctgctccgcatcctgccactgagttgagatcatctatttgatttagctactgataaagtgtttttaattacaaattgtctgcttgcttggggactgacacaaacacttgttttgttttcaaagtgccttctctccccagtgttgggtttggagtagagcaagagtaacacagaggttgcagtcagtgtcttccagcgattttcattttgtttgatatgcggggaacctgatgctgatgaaagggaggaacccaggagctactgactgtgactacagtggatattcacaaaagaaggacctcagtacagttccaagtagtgagaggttgatggattaggacagatttaagtaaaacttaacaggtttaaggtcaaagaaaagtgaagcaacattccagaaggacccagaaaagccgagcaagtcaggcactgagatcttgggattgagaggagttgctggttcagacccagcactgttctggaactttcttttgggtactctttttttgtttcatcgattcctttaaaaggtacaatccagaactgaacatgtcattccacaagtggcccaaccagtgttgtatacactgactggacaggttttgccactaaaatggaataatagtctggttttcctaattccaggaaaggaaaatcaaggaatagatacattttttaaaaaagcatttaaagaatttctcctgtagacattatcttaaacttttggtccctgccattgtatgtgtatcttgaatccaagggtaatacgatacgcagtctggcaaaagcagtcattttaaatgattgagcaatatttagtgactttcaaagagcagagagcacaacttggctaccatagaagctccaccatgatgggcgcagggtttcctctaggctggaagttgtgttctggttatcttgtgagagaaatgcatcctgtgtgatttatgtggattcatttattcttagaggaaatcagacaaaaaccatattgtaaggcccaacccatctaaaaagacaatagaaatgagttctgtgtgtttttcagcagggcctcatgggcaccactcgtaagtccagaatctcttccaagaacaggaagtttctggagggcagtggagaaggggagtgagggctcagctctgtgaggtcgaggtgggtgtgaggaccagcaccagtggggagtgggtttattagctgggaaaggccataaggatgaggaagagaagcttgtgtttgagaggataacagggaggaaaagtcgccgagcccagagtgtgtattcactgcctgtcctttggaggcagccgcttccacctcttttgactgattcttccaactcgtatcctccagtctccaaaacatgattgtggtgcagctgcttgaattttcaaacttgatttccattttagaagttaaggatttgtttttttttccaaccacataccctgtcgctaccacatcaaatacaggtctctcatactgttggtcagctccgttttccgtgttgacctctgatactctgtaaacactcttgacacgtaagctgggtggtttatataccaccattacttttcctgcccagctttgtctttttcttccttgtattttatttgtaaagattccccagctcgtccccagttgtgtcagcctcttttcagtgtgctcagacccattaggtataaggcctatccatgttcctgaggaagtctggcccagagccgtccaggtggtctgacctgggcagggccccgggtctgccatcacccagcccatgctctcctgccgccccactgaagacttccttcacctctcttggacgttagggtttctctttgatggctcctctctttttctgggtttctgatattttctggttgagtggtgctactttcttctaacctatttttatttcattaaataaataggattcactaaatggatttcatacccatgggttgtatgatttgcactttgaaaggcactgggctagatgaccactttgagtgatgctgaggcattgctgggtgacttccttctttccttcttccctcccctcctcctcttccctcccctcctcctcttccctcccctcctcctctttcctcccctcctcctctttcctcatgaagcatgtgcacaggtgcatccctgatgctttgatcaggtatggcctgaaagacaagccattttagttagtttttggatacattacgaagtaatgtgggaagtaagcatcttcacctgtccctcttccctccttggctgagggacagtgtcctagtcagttccatgtgctgtgacagagtaccataggctgggtggcttaaacaaaaaacacttaatgctcacagttttggaggctgggaagtccatgatcaaagtactggcatatctggtctggtggggacctgcttcctggtctgcagatggccgtcaccttgttatatccttacatgatgagagagagagaaagcaagctctgttgtgccttttataagagcactaatttcattcacaagggcgccatcctcatgacctgatcacctcgtaaaggctccaccttccaataccgccatcttggggattaggatttcaacacatgaattttagggggacgcaaacattcagtccctgacagggttaggcactgtgtggctggcaatcaccaggatgcctggagccctgccgggaccacgctggctcatttcagccaccctggatgaatcatccagcctaaggcccatgcctggacattctgggtcctcagtgccttgcctttattttacctgatataatccttcaaacgaaaatgctcgtacttatttttgatcacttaatatacttggccatttaacaatacagattaaacttgtgttattctgttagaaaactgagagattgttttctgtagtctttgactgcatgcatagtctagggctggactggggaggagaggataatttggccacaataggattccttattatctgtctcttccctcccaacccctcccccgacccccgccccatacaggagaccctcagatacatttctgtcagtaccctcagttacatattttgggagacgtaatacttaatgaaccaaaactctgttttgctggcagggaaaaaaattgggctgatacaatcaagataatcctatcaactttaggattattaggaatgttgataatcctatcaacattctatcaactctgtaatcagaaaaatatatttaaaataatgcgtgtttgttaaaaataaccaaacaaaatacagaaaaaagcaaagtaaaaattgacaatcccctaactccagtgttggtagttagggacagaagaagggtggaggatgtcttttgtctgtgttacatgattacagcaaaagtcactcttcattctggtagagccatagaaatctggccgagcagaggcagctgtgcctgaggagcctgacttcgaatcagctgtgttcatctttgctaacctcccaaagggaggaagctcaggaaaccaccgtagaaccccctaaaaggggagggtggctacagctgagcaggtgggggcaggcaggagtggagagaggcgaggatgatgagtcaggcaggtgagatggaggctttgtaggttatgttaaggctcctagacttagcatttcaagcagggatgtgacctgatcagatttatattttgcttgcattgctgatggacattggttcagtgctcattgtactggaagggtcaagaatagaggcagggacccaaatttagggggcttcccagggaatccaggggagaggtgttgtggcctggactagatttggaacatccagaaggggactggagcaatgacatacctatacctagtcccagagggccccgatctagctaaggacagagcgtgcagtcttgcagctgctgggctgatgacatgctggggagtgtatacctgggaaattctggtacagagataaaggaaatgctcaagcctccacctatgaatttgcccggtgattaaaatcatacttcctaagctttatagaagccctctgtttgtcccacaaagggccactagcacaaggaaatacataatgtgttcccttgtcattttataaaaatgtagactggtgctgcctgctgtgaaaatgccagtcaggttgcttccttcatagtaatcggtggattcttttgtccatttctgagtggaggattagccctctgtttgccccacaaagggccaccagcacgaggaaatacatagtgtgtccccttgtcattttataaaaatgtagactggtgctgcctgctgtgaaaatgccaatcaggttgcttcctttatagtaatgagtggattcttttgtccatttctgagtggaggattcctttccataacgtggtgtatttgcagtgtttctctcagaggaggagtgcctttctggtgtcatctgtcctgttggtggcagagttctgctgctgaattaaacctttgtgtcggccttggccactcttatggctctgctggaggtaaagccagtggagtggccttgtggcatttgctccaagttgttgctcatttttctgagattatcagaggccttagagggaagcattgaggatttcattatgctccgataactatcacgttgtcaataatatggttctgataagagtgatgggggatggtggggttttgtgagttgacagacgtgggtttgagacccagctctccagtcagaagccagcgccaggcctgtttctcttctctgagttttagtgtcctcaggtggaggggaggataatattaataacaccttcctgatgtggctccactgggctggccacgccatgggcacccagcacggggtggctgccctggttcgtgttaaccatcagcagggttggagagctccctccttactggtgttggaggtcattacctggcgggggatgtggtagataaagcaccttttattgtccctacacaaggcaactatggggtaacacaatataagttattcagattagagaaaatatgaactcttgctacagtgttactgcagacaggcacatatggtttgttaggatgacatttaaaaaaagtcattttgagttacagaataaaatcaaacaaaattcctttaatcaccagggctgggatggaaataaggcaaaatgttgattcctttgaaagacaatttttgggttttttttgttttttttaaaaaaactttatgtgttgatggtttactctggtctagtcgttcctactcctattctgaaagcaggccttgaattcctgattgtgtacaggattgtgtacaaacaatcaggaattcatcattcatatgaagaagttctgtttttccctctagtgtcatgaatattttcatgtacgtatatgttatgtgactagtgttaagaatgcatgtattatatatgtgcatgcgtctcatttacattgaatgtagctaaaaggaatatttgaaaagtataccttgcctgtctccaatttctacatttcaagttaaaaatgggaaataatcttagaatccatgcctgtggttcataagcctggctcagctcttgcattcccagctactgtctgacgaaactcacaggagctgtgaaaacaacgctgttttgtgaaagccaagtaggagcttagggtcatggcaaacttcagagaaatgtaaaggagcaggcactgtgggttttgtctaccccacccccccgaccccaccgccttccaaaatttctttctttttttttttttttttttttttgagacagagtctcgctctgtcacccaggctggagtgcagtggcgtgatctggggtcactgcaagctccacctcctgggttcacgccattctcctgcctcagcctcccgagtagctgggactacaggcacccgccaccacgcccggctaatttttttttattttttgtagagacgggatttcactgtgttagcccgtacggtctcgatcttttgacatcgtgatccacctgcctcgacctcccaaagtgctgggattacaggcgtgaaccacaccgcgcccagccccaaaatttctaattgaattttaaccttccacttttaagttctgatcctgatttataaaaacctatgtaattttcttcagctttcagaaggaatgtcttgtatcttcctatgggggtgttgggggaactgatattgacagaggtcctctgacatttgatagcctggcaaatagggtcaaacatgttccagacctcagaggattgctgaggatagctttctacttaagctagataaaagaagttttgggaatcttaccttgcactctgttttgtagaaacaactgtgtttaatatatttctcattactggctgaatgacctgtatgtgttcaggagatctctctatttaccattttaatgccacatatttaatgagcattcaggcccagactgtgaagactctggaaatgagaattttgtttcctatctcctgtgctgtaacaaaagcagcttaaaaattgcagtgtatagacctcaccttttatcatttttttttcagatttttaaatattaatattaagggtctttatctcagatgtttgttgtttaccaggtcatcagtatctggacgctggcagggtccttagcaatggagggagggagagggggtccagcctgcatgattggatcagtgttgaacctgtcccacctgtggggaagaggcagcatgcggagcagacaggtgcctgctgcaggtcaggagagctggccccaagtcctgacttggagggaaatggtacatattaatatcctttagtgccaggtactggcgtagctagtttatatgcatcacttgagcccccttgcatcactggcatcacttcaagatagacaacaaggggaatgcacatcatatccctgttcactggcgttcactggtagggaaactgaggcttaataatgtgcccaggtacacacagctgataagtaaccctgcaccctcgatctcacagcatgacattggaatccacctcattagacagagctcagctgcctattctgtcaaaaatgttgagttgtatcagctgcagtgtctgtagtattcctagacatttctgtgattctcataagtatctttgaaagggggccatttagtttatttctgcatttctcccttatctgccgaaatgcccgcaggctctgggacaagctgtaaagctctccgtgttatgctgtgttgcaaacccagtgccagtaatgatgcagtgctatttaaagataagaaagcaagctcacagagggagagcgcagcaggatgtttatgttccagaagcataaacacatgacctgtgcccgtcccgtgttcttcgtccatgtccccagagaggccgtggatgggatggtgcaagaaacccatcaggaagcagaattaatccttcctgcgggtggtccctgtgaagaagacacagcggccggtggtgtgacagcccacagctgtcgaaggaagggagaagagagggaccgagggccagcaatagggttttacagctacgtgctaggttgtctcacatctaggaaagagaatgttcatattatatagaaatgggcattttccctgtggcctgatatgaggtatccagaatattcctttaggtattattaagtcataggtttctgttttgatagaaacagcaggtggttcagttagtatttttgttgttgtaatagtagcttagatctcttgtttttgttttctttggccaagacagaaaacattctgccacacacattacttcatgactctggttatatattgagagcagcattaaaaaaaaaaaaaagtccaatttagtccattaggccattcttgcattggtataaagaaacacctgagactaggtaatttataaagaaaagaagtttaattggttcttggctctgcacgctgtactggatgatacaggatgcatgatgctgacatctgctcggctactggggaggcctcaggaagcttctaatcatggtggaagatgaagggggagcaggcatctcacgtggccagagcaggagcaaggggttgggtcacacacttttaaacaaccagatctcatgagaactcaccattgccagaacagcaccaagccatgagggatccacccccatgacccaaacacttcccaccaagccccacctccaacaccggggattattgtcaacatgagatttcggggacaaacatccacactatgtcgtagccttaaggggatcttacctctttgaagcattgtagagttcagagagtaggacattttgtctactgtattttaaaatactaaatgttctgattatgaaagtcagtcctggaaaaaaaaaacaaacaaacctgaaaccatagatgaagataaggaacaaaataaaaattacccacagtctccctcgcgtgtaccgcacagttcatgttttagtgtgtctacacaccatttaatgcaggtggacagactcaggggcaggtgtgccttgctactgctatgtccacagcacctggcagagtccctggtacagcataactgctcagcagttgggtgctgagtaaatattaatacatgtgcatgtggtaccagtcagggcccaacagagggacctcatgcgaggagttgctccacaggtgtggaggatgaaagaacaagttggggcgaccctgagagagcccagagacaagctctgcaggaagcaggcaccaccactgggccaggtgacctgagcccaggagccaagaggatgccctccactgctgatactacctctgcagtgggacgacatcggaccccactgccgatgctgggacggtgcttcccctccccctgaggctctcctaccagggccccctctcatcaggccccagctggaagccaactggaaagggagtcggggaagtttcatttgtgggggtccaagtgccaagggacagacaagggaagggtggatttgcagctaagaagatagtaaataaccagactacgtgacagtctgaagaatcaaatctggaatcaaattctactctgctctaatgtaaccctgtattttactgtgaataatataccgtgggtatcttccttgcttgatagatacagctccacataatttttctcaatgaaacagattctggagtaggcaacgttttcctcttttgtaaaatacaccaaattgtgaggattgaatgagataatgtcaaagtattagtactttaccctagctgattgacagtatccagtgatagtgataataagggtaattactactctagccaattttatcaaacctatggatgtttaaggaattgggttttttttttttctcctttgatgaatactcctgtaaatacatcgttgcctgcttgtctgagtctttctgtgggtttttagaagtggattacttgcagcaaagtctcctctacttaaggctctttgtatattttgcctaattgtgctctagaaatacatcaatttccagtcctccttctctcagaccacctgtccctcacattttcaccagttctgggtcttgttattctttttactctttgtcagtcaggtgattgaaaaatgtacatttttttaaaattggcatttattagtgagcttgaggatgtttttcacagtcatatggaaacagttctgcttcatgaacaagaccttggggccacatactggcttgttcacctggatgcattttctcagtctccctcagaatcatttttctccctgaaaaatgggattaaaagtattaatagtagtgcccatctcacagagtcattgcgaggattaaagagaggatgcatagatgtattgaatcagtgctgggttctggtagatgttcagctagccctagagattattagccatttgatgtgctgatcctcaggaaggtgggcgggagagacctagacgcagaaaaggagctctggagttgaggtttctagagatgaggtggtgcgtggtggcccagtccagcatggctctgggtgtgagcacaacataggcagatgtgtctggggctcagggagtcatttgtggattgagggtgctatgtgggtgtggaccacggtgatccaggatgatgcaggatttgggccggggaggaagatggcaacccaggttccatgccatctttaaagaggggatggttactagggtgtccagcgaccagccaagtggcctatagataataaggaggactcttcatgacatggaggctgaggtggaaagtcccagagtagggttcagccctggccctaaaaagtgccggagaacctgtagcctcctggaagctgtgctgtgtgcagagccaagcttcagtgtgacaaggaatggtgggagcaatttggagaagaatgaagacttggtgcagtggctagggaggcaggcagggtgaggatgtggaagggtgcagagctgctcaaggtcagcttcctgagcctgcggtgtggtcccttgctccacactcagaagggccctgtgtttgatttaatgctcttttcttgccatcttgaaattcttgatagtttttgaacaagggatccatgttttcattttgcgctgggcctggaaattacgttgctggtgctgaggggatgtgcagagcagaggtgggcagagaactgacgagaaggacacgtgggtaagggtgggatgagctggcctcaggactccgagcagagctcatgtaaaggtgtcgggcccaggatgcgttctcaggctggggtgggaggcctgatgatggcagatttctctggattacaaatagaatatgtagcagggtggttcatagctttgtgtgtctgtgtgtgcattggtaaatttttattttgaaactaaaattatttcaaaattagagaaaggctgtgagagtgcggttgagctggtgttggctctggaacagggtttcccaatgcaggcggcactggtaactatgtgccttgggtcattctttgttgtgggggctgtcctgtgccccatgggatgttccctgcacccctggcctctgccttctagatgctggggggcactttccctggtgtaatattaaaaaaaactctccacgttgccacatttggggggcagaatcaccccctccccaaattgagaagctatgttattggaacacagtgtcctgtattttgtctagcctctgctgcttagagctgcctgagcttggagaagatacttgttctctttccaaagcttcactgtccctttctgtacattgtcaggacggctgttaataccactgctctaaatgtgctcagttttgcataaacatcagctaatgttaaaattttaatctctgctaatataagaggcatcgaagtacacgcgagttcagtttgcatatggtgaggagggagacggcctcatatcgtatgtgtgtatttgccgattctatattttgaggttgattcctgttgtcttttgttcagttgtctcattctgttttcttttggggctttgaatgcccttttcatgcctgtgacctctctttactatgccttttcttctctgccagcaaatctcatccattcttccagggcaccttactgtcccccaaagccccagtgactgctctgtccacagggcttggtttctgtgctctggctctgcaatgcaatgcagaaggggctgggctcggaatggggttgctggtcaggccatgtgcccaggggaaggacacaggactcaaggagtccacccctctctcccccccttttttttttggtcactgaaatattttctttccaattctactagtcctgctagagctgccataacaaaatacccaattggtgacttcaacaacagaaattgattccacactgttcttttttttttttttctttttgagatggagtcttgctctgtctcccaggcaggaatgcagtggtgtgatcttggctcactgcaacctctgtttcccaggtttgagcagttctcctgcctcagcctcccgagtagctgggactacaggcacatgcactgtgtctggctactttttatattttttagtagagatggggtttcaccatgttggtcaggccggtctcgaactcctgacctcaagttatctgcctgcctcagcctcccaaagtgctgggattacagacgtgagccacttcgcctggccatgatcccgcacagttctgaaggccagaagccaagatcaggagaccagtggattgtttctcccgaggcctctgttcttggcttgcaggtggccccttgctgtgccctcacatggcctttgccctgcgtacatccgaagccccagtgtctctctgtgtgtccaaatttcctcttcttagaaggatgccggtcatattggattagggcccacccgtgtgacctcattttaccttaataacctctttcaagtttctgtctccaaatacagtcacattccaggggctagagcctcaacatggaagttttggagggagacacacttctacccataacaccaatgtcatattaagctttatggaagaatagaccaatatgtggtgggttcaagaatcttttcttagaagaaaagtgaatctgtatatttgatactttatgatttccttatttgctctaagcagttggtaagaatctcagtgtcacttggctgaatgatacactactggtgcctccagacctatgaggagcctaatatttttgtcttggttgaaacaatgcaaatcctgggttttggagatgctcacagccagctgtctgattacgtaaactgaaagtggcagagaggaagcttttgcgtggggaaaacatgaaatatacaagggttcctttaaaacagagtgtacttctgaacatttactgaaggtggagggccctggacacctgatgttatcttatgtggcgttatctgggtcagatttcattgcatttcctgaagaggtaacttggcagtcctgggagaggctggaccttggtgtccaggtggcaggttcataagacacctgtgatttgatgtgagccagtcacagaggaagccatttccagagaggaacaaccgtgtagactgctttcctgggagtcaagttaaaacttctctcctgtgaccttgtcacccggcagtggaaagttacccttggctgcagccacgacttccgcatactcttcagaacttgctctgcccttgagttttccagctttcctttaatgcactaaacctttaatattgtattctcctaaatgagacgtctcgcatttgagcaggtaacactcggtaagactttgcttggtgggggaggaggttttaccttcctgtggcattctgaagctctccacatccacccatagtcatgattgtgttatatgacctcaagatgctggagctgttaattcatctttaacataattgacctgattacttctttcttgaaggattttgttcaaacctcagggtttatttaggaacaagtctaaccaggcctgattggttttcctaagtggagatacagctttgggaaacaaattaagaaaatgaatggattgaaaatgtaggaacaccgtgacagttgtgaatttttcttattgagggaaaaaatgggtatctgtgaatatttctcttacactatatagtgagaaatgacactctgctgtggatggtaatttatttctgtgtaattgcctgagtaaggctttctctgatattgaatactgagtagaactcttaggttatttttggaagaattatggattttctcttaggttttagaatattttttgtttgcctgttaagagaatttgatgaagatttcaatgtaattaaccaaataaaatggcattctgtatcctgggaagggacgatgtctttcagttctaaatcaatgcatcatttacctcctatctctcttgctggccgagccatcaatcctgtttttattaaatgttgttgttattgttttgagacggagtttcactcttgttgcctaggctggagtgcaatggcataatctcggcccactgcaacctccgcctcctgggttcaagcaattctcctgcctcagcctcctgagtagctgggactacaggcatgcgccaccacacctgactaattttagtagttacagggtttctccatgttggtcaggctggtctcgagctcccgacctcaggtgatccgcctgccttggcctcccaaagtgctgggattacaggcgtgagccactgcacccggccgttttttgataaattttaaacttctggtttgaaacttttgtttcctgtgcttaaaaggagacagttaaaagcactctgatttggactgacagaatgttttttagatgttagatagatctagctttgaatatttatttgcagagaagtagcagggaggactaggaatgactttttcttaggaggtgctatgcattccatcaggtgactgacccctttgtgagctgtagtggtcagtcccagcatggcccacacttgttggctgtcttagccatggtggctgtggttggcgggtacccagccaagggttttccatactgggggccttggtccagtgggggcgggtcgtaccatgacccccttctcctgtgatcttgcctcactggcccaggtaaattggtggacgtccttgactcctccacctccaaaaggactttgaactttggcactgttgggagtttaggctacacctcaaccaggcagagattgggatctaacctacttttaaaagccctctacagggaatttcataactttcctgagtgttaggttttggtgattaacagccttgactttttggagcccttcctttgccaaacatgcattcctcaggtgctcacttaaaatgattcttcacaatatgcctatagacgggtctgtctggtacagcatcctggagtggtgtcaagggaaagaaacatgctgcttctgccacagacggaccatgcatgggaagaaactatttgagaatggctctccaaggggctggtcggccttgtctgcccactccctctacctttctttgttctgtttctttctcttcagtgttggtccattttccttttttcactgttgcgtgttagcacatcattactcttatctccatatatttggatgtttcctgcattatggtgagcttcagtaggtcttggatgagttagttgttctcattccaaaatgtaaatttctggtgtttagtaggtgctcagtaaagcttgagaaagatgaaagtgagagcccagaactagtataaaaatacggataccaccatagcatggtaattaaaggggtgattgtgaagatgaggtagctgtgcctggatgtgtgtgtgtgtgtgtgtgtgtgtgtgtgtgtgtgtgtgtgttggctggagaaggcttaccagtggtgctggacatgtcgggtagagtgttaatagtaacttaattgactgaatttggaaataatctatggggttagagagcaaggaggtagctgtgtaagaggatggggtcggtgaggtggggtggtgtgagcaatggagctcaagggctcaaggtgcaggcctggactgatggccactaggaccaccccaatggcttcagggtcaggacaggaagggaatgtgattattgcagcaggtagtagggcagtatgagtgtattattcatatatgtgtgatgaaatggagcatcaaataatatatcccataggatagaaaggcacagtgagtgagtttgggttaaaaattcgatgagataaagtggttgtacctcctatgaaaacaatttaatttcttattatgaaggcattactcatgttcttcagaaaaattaaaaaaaaaaactcagtcattatagacaattgtactcaagatgaaaacaccctgtactgtcgcaaccctgaagcacctctgttaatatgtgtgtgtcttctcacggggtgattcttgatcagagttactgaaacagcaaggcttgggaacaagaggcatgagagcaacactcaggacctgttcagttttctgcacagttccaggtgctcttccagcattgctggctccgagagagtcaaatattcagagcttgcaagctggggaggaaaggggttagggtggagataaagatctgggagatctacagatacggatcatctgcatttggaaattttgtttgcccttctcacacatttccatccaagttttctttggggaagaggggatccctgcagaggagtccagttgcaaatgtgaaatcttaaaaatgtatgtaaatagcatctttcattccgtgatacttgtttgtttgaatagaacattgttaaattttattgtgcttcagaatcatctgggtgcttacaaacatagattgctggactctggttctggagattcggattctggaagtctgaagtggggcttgggaatctccatttcttccaagttgccaggtgatgctgatgctggtagtcgggagtccgtactttgagaaccactcttctacctaccaagacttccaaaaaattggtactctgggaagatgccctgtgccagtcctgtggcttcttaggcacctcttccagcatagactcctgcagagaacctggtacctgcaagtacctagtacctgcaagtacctgcaagtccagtgtgggaaatctcatgacaggcatcaacattccgtgacggttgacagccacctatggggtggctgatgccttttctgtgtcttcagggctttaggggaaggagagtctaaatgagtggttctaggttgtgggaagagcctggctttgatgttcagacacctggcctcaggctgcatcgcccatacttcctgtggaatggttatcatgagtcctgttgtcctgtaggtgaatcattgattcctgtctttgcataacctctcacttgatgataatttttttttaaaaaaatgactcttggaaacagaacacacagtttgtaaagggacctacagtacagcagaagctttgtggaaggatacaaaatgtgagggactgtagtcgaagagatttaaattggaagtgggaagagattgactttttttttttttttttttttaaagacagagtcttgccctgtggtccaggctagagtgcagtggcacaatcttggctcactgcaacctccgcctcccaggttccagcggttctcctgcctcagcctcccgagtagctgggattacatgcatgagccaccaggcccagctaatttttctatttttagtagatatggggtttcaccatgttggccaggctggtctcgcaaactcctgacttcaggtgatctgctttgtgtctcttagggagcatgtttgaagagtcaaaggaaaaccaagtctgttagctttgcgaaacgtttttttttttgagatggagtctcgctctgtcccccaggctggagtgccgtggcgcaatctcggctcactgcaagctctgcctcgtgggttcacgctgttctcctgactcagcctcctgagtagctgggagtacaggcgcccgccaccacgcctggcaagtttttctggaatttttagtagagacggggtttcaccatgttagccaggatggtctctatctcctgaccttgtgatctgccctacttggcctccaaaatgctgggattacaggcgtgagtcaccgcacccggcccgaaatattgttaaaaccaagtacctttgtgaaacattgttacaaaaaccaagtaccaagtgtgtggcattaaagtcaaacattaatttcaagttacagaaagaaatagcactgagtagaggttgatcgataaaaaatgaataaaatattcaacagaaactccttaaaaataatgtgagaaatggacatgtgacatgggcgtttaaaaagtctgtaaggccaagaaaagtttcctgaaaggaacactgtgcccaggcagtcctggctttgcaggattccctgataaccgagctcaggcatcctgcagagtgagtactgcccagatagaaccttctgcctctttggggtaaaattcgatttcaaagagagagaactgtggggtgagaaaggaagactgggacccaaggggccaaactagtgacaatgactgctgtcatgaagggtgacaaggacaatacctgctgagctcaaaccaccctttggacccagtgaagctcagatgttgcttccagtgcaggagtagttaagctcaactgttttacaatatccagttatttggctgggtgtgatggctcacacccacactcctagcactttgggaggccaaggtgggtggattgcctgagctcaggagttcgagaccagcctgggcaacatggcaaaaccccatctctactaaaaatacaaaaaattagccagacgtgatggcaggcgcctgtaatcccagctacttgggaggctgaggcacgagaatcgcttgaacccagggaggcggaggttgtagtgatccaagatcatgccgttgcactccagcctgagtgacaagagtgagacttcgtctctaaataaataaataagtagcaaaaacaatccagttattcctcaaatatttatgagcacctcttaatgtttcagatactattgtgacaagagaaaaatgtgtttgtatatgtaaatagaaaaacaaaagtgatgtggaagcgattacttctgtcattttggaactaccttcctcccatattaagtccatattatgacaattcaaaaataatcaaacttcgtaagatattacctgtgaaaggaataagtatttaaaaatgtattttagatggccttttagaaatctagtccgtggacacaatctagcatcatgcagttgccttcaaaaagaatatcctaaagttcttgtttgttttctttttcctttcaaagtgttctgttgaaaataacccatttgtcattttagttttgatatgacttagttatacatgccttttgaagcagtacccacccacatagtaattgcgactatcttgtgttttgaaaaaaaaaaagcgagacaatttgactttgatagttttaagtttaaaaaaaaaaaaaaacgctccaagttagactcagatgaaatcctttgatcttaggtattttatgaggaaactggaaaaaataatttcacaaatttctattttgctttataaaaattttatgattcataacacagggaaaatccagtaagctaaggcgttttttagttgtttatcttgctagtgagtctttgatgtgagttatttctttgcagtaaggtggcatggatgggtgatgaggctaagctgaaaagttaaatctcataatggacatttgcaccctttaaggaagtaaagctctcaaagcatgattatggccaagatgaggccggtggcatgtttgtctcctaaatgtgcagccaggaatctcgacggtttgtctgaggtatgcaggtgcctggtagataaattagggtgagcatcattcatggcgtgtggtcagttgcaggccttcagccacagggatgacagaagggaagtgaggaatcagggatgggtttgaactgcggcgttgctttgggagtctctagacatgatcagttgcacatgtactgttctccttgtcaccctcaggatctactgtcctgtggttgaagcctgcagctctcccaagttggtggcactgggcttcctgacttctcgatgtctaatgagacagtggaattctacttgcagccccactgcaggccaggtttatctctcctctgtcttcccagctggtgatttggtttctcagtgctgttttgggtgcacttttgtggaggattcaagctggtccttagccactccttgaaccagaacctcttttactttcttatgtagttcttctcttcctgtttttatatcctaaaactagtccagcgaccagcccatcgtagtagaagcgttggtgttcttcctaaaaggaattgtaaacatctcttggagagtgggttagccaccataaattgttttgggacttcggatacccccttccgcaaatgctatctagagatgctttaatttcatttcaattggttattgcatccctgatattttgaaactgttatgagtagaaaacattctggtttatgaacaatctgcttttcactatgaaatagatgggaattgtaattattcctgcgctttgtcttagagaagttacatgcatgcatcaagtgttgtgtgatcttgtgcagttcttcttagattgagtttttggctcctcgtgtgcaggccttctaaaatcacaatgtccctgagttgggaaggaacatcaggggctatctggttcattatcctaccccccaccgcctcccacgccccacatttctggcagcctacgagtctttggtccctccccagtgctacctggccagctctcagccttgggaggccacctgcccgtgtttgacctgggttaatgaccgccagttcctttcccttaatacgactcatctgctctcctgcatgctcgctccttgggtgagagctgccctctgcaacctcataacggaaaatggcttgacttctgccacctcctcctccttcccatgaaagaatctggtcttttctatctctctattatttttaaaaccagattaggttggttgtggtggctcacacctgtaaaaatcccagcaccttgggaggcagaggtgggcagatctcttgagccccaggagtttgagaccaacttgggcaacatggggaaatctctaccaaaaaaatacaggaaaaaaaaaaaaatagctgggtatggtagcacacacctgtagtcccagctacttgggaggctaaggtgggaggattgcttgagcctgggaggtcaaagctgcagtgagccttaatcactccagtgcactccagccggggcaacagctagaccttgtctcaaaaaaaaaaaaaaaagaaaaataagaaaaagaaaccagattaaacattcctaagtaattctttttgtgacttttgcctgtttattaactatcctggctacttaaaatgaatttttgagttatgaatacatttagatggttttaaattcaaagaagtctcttttttctcagtcacttccatccccagccaaacagttcttatccccagagtcagccagtgttaccagtttcttgtgtccatgcagtttgctttatgcatttacgtaagcaaatattcgtacacacacacacagcctttctatcttatggaaagttatttcagtggcacatgtaagtatctcagcatctcttgattgtcattctttttggattttttttttaaatttcatacttacaaatgatcatgtatcttaagttttctgaagtagccttggtttcgcattttgactgtatttattatggtatcaggttccatatttcttaaaagtaatactgctgctgcacttacattgaacaagtcaccaagctctgttaattttgcctgaaaaatgccactgctttgacatgatagaaaacacaggcaatagtctttatttctcactgctgtttttttcttattttgaagaatcaccctaatacataggaaaatctcgacttagcaaagagataaatgagactgtaattattgcattgggtttttcacaatgtatgttagttatctattgctacataacaaattagttttagagttagcagcttataaagcaacagatatttattatctcacagtttctgtgggtcagtaaatcaaaagtggcttaactgggtggttctgacatgtgcctttccacagtgactggtatgtagcaggcaagggtctcttatgatcctgagtgaggatgtcagccaaggctgctgtcatctgaaggcttgactggaacagaaggacccatttctaaaatgagtcactcacatggctggaggcaagaggcctcagttccttatcgcagagattgctccttggggctgactgagtgtctgcacatcatagcaacagctggctttccccagagggaatgatccaaaagagaggtggaagcctaatgtctttgtgacctaatctccaaagtcacacactgtcacctcttccatattctattagaaaggagtcactaaatcagatacccatgggaaattacccacctcatgaagaaagaaatatcgagaatttgtggacctgtttcacaaccacacagcatcattttttgaaggtagagtcaccttgagcatttaaattagggttctgctctagaagtctatccctttattttttcccatttgttaaccctttttctacttggcataatagcagccattacccagtagaagttgagagatttaggttgcacagaatcccacagtcttttcagaaactcatatccttagggtgtctgcttgttgacagcattgtagaattgaaacttgaccacgtgttatgtgttgggctgccagtggtgatcagagatgacggtgagtagtccgttgagttagggctgtttgcctctgtcggtgtcatctgggtttgaactggacttgcagtcctggtgggctgctttcatttccaccctgggtctttgttctcaccactcacatcttacgcctctgttccaccgctgtgtaagaggcaactgtgcacacaccttgcctctgccattgactgtaagctcctgagagagagagagaatgtgtctggttcagttttgtggccctcctttttgctagcataatgcattgaacatagtatcattctgcatttttgttgagtgtataattagatggtcaatgtggagaactcagagggattttaggagggggtggcagcaatataaggttgtgggacccaacattaagagagggaaaggtgtagcgggaaggcgttggtgtggggagggagaaagtcaagaggattcaacctggcaagagttggaagtgacaggaaggtgtgtggggtggggacgcaataggacagtgtgtgagattttttaaaaaatgcaggcaggggagggatgagtaggcagagcaccgaggatttttaggacagtggaaatgctctgtatgatactataatgggggatacatgtcattatacatttgtccaaactcaaggagtgtacaacaccaagagtgagccctaaggtaaacgatgggcttcgggtgatttcgatgtgtgaattgtaacagggatactactctggagcaggatgttgatcatgggggaggctgtgagtgtgtcgcggtagggggtacgtaggaaatctccgtgccttctgctcaattttgctgtgaccctaaaactgctctaaaaagagtagtcttaaaaatgcatgaaataggatcctgtctcaggactggggcaagagcaggtagaaatggaaagagtgactgtggctgctgtgtagcaggcacacaatggtcatggtccatatgctggcttagttattttttaaagcaactaaagttaagtaatgtatacttaacttacatatttatgtggtccaaaaaacgttggtcatctgttttaatgcagagagtgtttaccctaagcctgcaaatgtgatgggtaatagctagaactagaaaagtactttagaatatggaaggtaaatacatgaattaatttaggtaagagtgacaaaacaggggaagtccctgacttagaacttattgtccgcttggacagctggtgtacgtgatcctggggtcacagtggctccctgtgcaggaagaacactatttcccagctcagataccatctttttaggagagtacctgccattgtggaaaataaggataaaggataacaagttacctccttaagacaaagtcataggagaaatggtaaattccagtatcttgagttttgagttggaacttgaaatttattttactacaagaacactgttgatggattatgtattttatagactttgtgggtggctatgggactctagtaactgcttatgcacagtttatatgagtagggctgctggatttccagatgacgctctcgcaactgaaccttcagattaccacctgtttctcagtttggacactattagtgtgctgctgtcacttatggctcgggcaccttatcttgttttatgtcttgatgaagaagtacaaaattcagtgtaaaagaaaaacatatgtaaagcttatagaatcaccccgttacacaataacaatgcagaacaatagattaataacaggaagagatgctgaaacttctcttcagcctagtttctactctgatgtttcttctctgcattgtacagccaatctatgaataatattttcattgtctaagcaaagccaccttagctaaatatttaattctactggagtcataaacagggttcaaaatatcacacatagattttatgaaagtaataaaatgcttcagaaagtacagtggctcagcctggggccactgcatctgataatttggttacacaccttgtcatgtgcttcctaaaagaatgacgatggttgcttatctgtgtttaagcttgtcattttgaggaaacaaagataagacatttttgctgtgtctctaaaatgcatgtgtaaactatttttatagagtaatgcttcagagaggagtaaaatttcctgcaacaggtgcttgtaaacagtaattgctcagtaaaggtcacctcccagctgttgcctacatgttacataagagaaccccttcacgtcttccgtatttgcagctctgtacctttgtgagtcacctaaaaaataactcatagggttgtttttctttctttcttttttttttctttgagacagggtctcactctgtcgcccaggctggagtgcaatggtgcgatcccggctcactgcaacctccgcctcctgggttcaagcgattctcctgcctccattctcctgcctcagcctcctgagtagctgggactactggcatgcatcagcacgtccagctagttttatatttttagtagagacagggttttcaccatgttggtcaggctggtcttgaactcctgacctcaagtgatccacccatcttggcctcccaaagtgctgggattacaggcatgagccaccgtacccggcaggtttgtttttcttatgacaaaatcaagcctggatggtgtcgttaacggtgaagttaaaatttttcttttgctttccttaatatttccgtgtttttttctttttctttttttttttttttaacaaaagtctggtttctaaaccaaaatatttaatgcttcaaaaggaaaaaaatgtaagtcagtccaaagaaatgattcattttgcagaggtaattactactaacatcaacctttccaggtctttttctatgcagctatatcattgacatttttttaaaaatgagattacattgtactggagggtagactgctataacaacttttggttttggatgggaataaacagaaaaagtctcatctccagttcatttctggggagggtcaggaggtggggggtgcttggctctactcccttcgtatgattttcccttctttatctccaggatcttccccatttcacggagagacatggatgagaatgaaggctgctgagtgggaggggcttatggggccagttttgaagaggcctcataccttttggccacattccattggccagaactttgtcatatgactgcacctaactacaaggaagactgggaaatgtagtcaagttgcatgtccgggtagaaaagggacacttttctgtggaatagctagcatgtttgtaactcaattttataaaccattttgaaacttttcttaaaaaaagcttatttcagacacatttttatatgctggatctgctcacctctccatctctatcttattaaaagttcttgccagaatctctctccaattgttctccctccttctgccctgttccctcacagcagccacagtggttctttcaaagactgaagctacattttatcactcgcctgcttaaaactttacagtgcttctcccccagtggtcgggataatgttcaccctctcctgaagctggcctctgtggtccttgaccccatcaggtcccacggtgccctgcatggactctgccatccttcaccagcttccccccatcaaacggggcttgctgtcagctcttcctgcaactcccagccctgccgcaccactcagccttcttccttcaggcttcagctccagtgtcttttcgccaaagaagcctttcctgatctctcagccataaatgttcctctccccagttgctttttccctctccctctactcagttgctttatttaactgtcatattgtctttggagcacttgccaccatcagaaattatcttgcattatgtatttatagtctgtcttccgcctactagatggtgggttgcttgaggcaggaactctgtcttgtttacatctctatctccagataacgtgtctggcacgtgatgggtactcagtaaatacttgtggaataaagaaatgtcattacaggttctctatgcattaaaattttttagaaatggggtgttgcagccgggcgcagtggctcacgcctgtaatcccagcactttgggagactgaggctggtgtatcacctgaggtcaggagttcaagaccagcctgggcaacatggtgaaaccccatctctactaaaaattcaaaaattagctgggcatggtggcacacacctgtaatctcagctacttgggaggctgacgcagaagaatcacttgaacctgggaggcagaggttgcagtgagctgagatcccgccactgcactccaccttgggtgatagagtaagactctgtctcaaaaaaaagaaaaaaaaaaaaagaaatggggtgttgctatgttgcccaggctagagtgcagtagctttccacaggcttgatcgtagcgcactgcagccttgagctcctggactcaagtgatcctcctgcttcagcacctccccgagtaagtggtactataggtacttcaggttttgaagcatgtgtaaaaaatactctagcagggacatcatttgagctgagcaggccatggaggcatcaaatgattagcagtagggtacaacttgttgtgagaaccagaaaagagccttggcctacataacatcctgtgctaaagaaagaaccctgactcccagcctgtgagtgttccagagatgggcagagcagtccctgcagcgcttcagggaacagggaagagcagctaacccctgatgcttctgtaagcactttgggacgccctttgctatagtagggtattgtcttagttatccctgacttgcctggtgttactttacatcccttaatcctttcatgaagactggcaaacacattcagtcctgccaaccttgaaagtaggccatgtttgaaagaacattggcacaaacgagttgcgaacatcttctttaccatattcatgttctttaccgtattatgaggacactgtgcttgccacatgggcagtcttgttttggggatacgtggttggatggacggttgggtggatggaagactcctggaatgtgaagtatctcaaggatgtgtgtccattgcatgaatgtatgtttgatctatgcagctaattgacaaagatccaccatcctgtaccctccatgttttatttttgccctgccattgttctcttcgacattctataatcatcaaggttttcttgccctcacctaggtcttgactaaacatgttgggtaaatgaatttcatattactactttcttgcgccgtcagccattgtgttcttggggactccatcctgagccttttttttttttttgagaccgagtctcaaaaacagtgaaggcaggtgactggtgaggagagttccagccactggattctccctcagtcccctgtgctgtggcccttggtgacccctagatttcagtgcccctgcctgacactggagtccctctgtaaagaagcccctttctagctagctagctgttccatcccgcacacccccacagaagccttttgctgccattagtaagcacgcctctattttctcacctgtgattgatcatgcatgattgagttttgtctattaaagcaattgataagttactaaaatggcaccaaaagaaattagaaaaaaattgttgcaaatgtcagtgaaatcttttaaaaaactgttgtactttagaagtgcctcaagtgactaatggaggcttaggactctgagtggtgtcacaaggaaccttatgcacagggacactgacattagcctgtactgtcacccaggctggagtgcagtggtgtgatcttggctcactgaaagccccacctcccaggttcagcaattctcctgcctcagcctcctgagtagctgggattataggcacatgccaccatgtctggctaaattttgtatttttagtagagacagggtttcaccatgttggccaggctggtctcgaactcctgtcctcgtgatcggcctgcctcggcctcccaaagtgctgggattacaggcataagccaccatgcctggcccctgggccattttttattcttactcttaggctaggtttctgcagaccttggttataactgcaggctctacattgataactgctgagtctctaagtcagaccagacgtttctccccatttagtgatacatgttttccatccaattgcttcatagacaccttggacacagtgctctatttcaatttatgttgacagttcatgacccaaactggaaacctgagttatcctggacttctgcctaccaccttctcctaagccatctcacctgtcctaaatgtcgtagcccttatctagttctctaagctgtcatagggtcctgtactgctgggctgcttgttgccttcaatagagcctggagcatattcatgtcggtatttcaaggccccgggcataagagcttcttaggaaatattggaatgaatgaagaaatgatgaataaatgaacaaatgaacagttgattgatttccaagacactttggggtggtttccatttagaatggtttttatttctttttactggaactaaggaattatttttgcttgttgatgccaacattttaaaagcactataattttgaaatgttttaccacattaaattcttttctattgcaggtcacatacaaatatgtcaacttcaaaggaggaattatttgttatatttatgcaaacttgtggcacttggacatttatctagatggttttttgtgtatgattgtgttcttggtacagctggaaaagctaactttaagtggcaggagtaattgatcttaatgacttactttgaattaaacttgtgcttaattaacttggatgttctaagtttctagagtcacagacttttagagctggaatattgctttttgaacttcagtgtaaggaagaattgcttatgcttgaattgatttgttctgtatcccaatactggactgagtagaaatcaattactttaatattggatgagagagtgattgattgaagatcaggtttttaacctctttttttgttctccttctcacagggagagtcccgtattctcagagtaaaagttgtttctggaattgatctcgccaaaaaggacatctttggagccaggtatgttggctttgtttttatttctgtggacttctgaaaaattgacaagcagttttcaaattcaggcacgcatcagaatcacctggaggacttcttaagacaaagctggctgggccccacctgcagggattctgatttaggaagtgatgctggcccagctggttccaggagcacattttgcacagggcttctggacttaccatcacaacagtagttaacagcctgttcttcacatgggctaatttcatgagattagcttctggtgttgtattctcagtagaaaaatacagtgtgggactatggctctgcttattttaatacttcaaaaatatttcaaacttagggaaacataaaagtgtcattttgtttctaggagaactggatattctggacatgtataatctgaattaagagatttggtgatttggggcgaatgtggtgatttctgtggcatttctagaagtaccagcagggaagcagccagatctttctgtgtgtttcagcttttttattttcagtattgcacttggatattcctgtatctttaaatcagcccttttgttcctattggctgtcagcaatgtgttgcatgaagttattggactgggagcagggtgagggtagccgtagagccacctggcactagaatttagccagattttggagaccaaagatcttttgaactttaaacctggaatggacatgagtgatgttctagtccaacttttccattttatggttgacaaagcttgaatccagaaaggttaaactacccgtgcaggtcacgtgggccagtgatgtttgaggagtgacaggaacactcctcctgcctctacccagtacattttcctttgtggcatggtggcctgaaaatactgtgaggtttaacaatgaaggcaggtgactggtgaggagagttccagccactggattctccctcagtcccctgtgctgtggcccttggtgacccctagatttcagtgcccctgcctgacactggagtccctctataaagaagcccctttctagctagctagctgttccatcccgcacacccccacagaagccttttgctgccattagtaagcacgcctctattttctcacctgtgattgatcatgcatgattgagttttgtctattaaagcaattgttaagttactaaaatggcaccaaaagaaattagaaaaaaattgttgcaaatgtcagtgaaatcttttaaaaaactgttgtacttagaagtgcctcaagtgactaatggaggcttaggactctgaatggtgtcacaaggaaccttatgcacagggacactgacatcagcctgtactgctggtaatgtcagagtgaagcaaatcccacctgaaggcactctcttgcttgaccgtgaagtcacactgagtggttcaccatgtgcctgcactcatgcaaggataagccaggtctctaggcatgggcagaaggatccctgcttcccttctcttccctttcagagcaacactttcagccatttccatgagtctgggctcttgttacccagctgaaatactgtttcctgaaactcacaaatttgctctctaccaaagcccaccttatgccctgcctttccatgaagcctgtcaagaaaattccaagaaagaaaatttgatattcctatatcaaagcgtgtgtctttcctctcctaatacctcttagctgccacagtaggtgcaatgtcattttagcttttgcagatgcattacctggtggtttcctagtatttctttcacttgcctcgattgctagattagaaatttactggggacagacatctttttaatatctttctcctactacttaacatatagagcatcaagggaaaaaaaaacaaaaattatcttttaaaaatgtaaacatttgcatgccaaccggtagtggattgtgcccttaggttaaaaatatgtattctcactctttccaatgaaatctgtagtgctgaaggagcaagttggatttagaaaattttggtgatttctttttaagcttgattgggtttttattttgttttatccaaaccctcccattaaaaaaaaaaattgattcacattgtatttctaagccagttaagtagatttaaggttgaatttgtagtggaattaggctccaaatcttagaagagcaaattcgtaccttgaatttttactgtttagataataacaggcagggtcatttctaagggacatggtggaaaggaatattcgtgatattaattagaaagataaatcgtattgtggccaagtggaccaagtgccagaaaatgcatcagaaactctgaatcctgcttctggtcttcattttcctagattgataagtaggcgcacacattcctgctttcctccctcctctgaagtgctgtagttcttcagggacacatttgccagtgggtctgagatgcaagtgtgaggtggcagtgtgggttaatgccatcttggtgtctcactctggagtggcactgcttattgccttaaaattttgccagatgacctgcattctccctccatgctatcttgggcaaatcccttaaaaccactcatgccactgtgtattagtgtacaacaaggataacagtttctttgtaactggcatgtggggaagaaccgcaaagtgacttctgtcggcagcagctctgtcgtgttttaaggtagtagtcaccgggcagaggtttggtagtgtcctctctggcagccaccgtctccttcagagccctgggccactgacatgccttttctccaagtctcttccctgagtattccccgcacctctgtgcctgatcagacacctcattctcccttggcagcaagaaggccgggtaggcattggagcccttgctgtagacaggataatgggtgaaagaggaagaacattttcatgagaggcatttcagagcctttaaagtggtagaaatcctgtagacaatgatgtttttaaaatcagggatttgcatctctgggactccaactcctttgtttccaagggaggttccctgggccacttggcctgaggttgggaaggggtcggtggttgcggggcagaatgtgatgcttggggatgcaggatggtcaggggcgggtgacggtgggaggagtggagcacgtcatctctccttgcccttccgaggtggtgatggaagctgcctacagctccagctcagaggccgggggtttctggggcccttggtgtggggcctctctcctagctggaggtggccccttcccccttgagaggcctgtgcctgaaatgcccttgtccttttcggccgtctcggccccagtccagtacttaggatccaagatcattttcagctccttccagccaagtctcactttattaaaggagctttgttcggagcagattggataaccgagccgtgactccacttgaacatctgagcagttggcccgcgtgggaaacagcaatggcagagaaagatgcttccctttggatcataccttgaggacaaaaaagggcagtcatataatctgtcatctaaactgggacgcttttgtctggaatgaatgcgacattgaatgggacgtccggacataagatgtaaattgagactgcagtcaccctaggtcagagacatccagcctttattatccatatcatggggaaaaaaaaatggaatgtgattttttttccccaaaacagcttaaaaaaaaatgctaagtaaaagaaaaaaataaaaagcaccttttaaaaaagcaggcctcacataaaatgccactaagacatcaaaagagaagtaaaaccctgctcaaaacgcccacgtggggcggccacagctcacccttgtgtgcctgtgtcccgtttctgctgtcccctttcccaaggacgtactctgccctaacctcaccctgatctggtgactcctccagtggcccatcctatgttcaccagctgggtcctcatctcctccgccacacaggctgctgctctgtcccccagcagacctctccctgtctctggggtgcccatgacccctgggaagtgctgtgcatagttctgtgagtgaggttgacttgttgttttatgcttagaattgtttctttctcctgaaattagatttttctcctctgatgactaggattctattttatttatttatttttattttccacgacctattatagcacatagcacctaacaggtcctcaggaagtatttaccaacagattgcatgaagtgagcccgttcttcctccctctctccttccctccctttcccaccccttcactggaaactcacagtcactaaatatgccatgaagttgctgccttttgcctttgcctgtgttttcccctctgcctggcatctgctcacatcctttctggcagctgccctctcatctgtcagggcccagtttgggtggcaacactcctgctgaggcccctgcccgcctcatcaccccagcccaagaggacagaacactgctgcccgcctcatcaccccagcccaagaggacagaacactgctgcccgcctcatcaccccagcccaagaggacagaacactgctgcccgcctcatcaccccagcccaagaggacagaacactgctgcccgcctcatcaccccagcccaagaggacagaacactgctgcccgcctcatcaccccagcccaagaggacagaacactgctgcccgcctcatcaccccagcccaagaggacagaacactgctgcccgcctcatcaccccagcccaagaggacagaacactgctgcccgcctcatcaccccagcccaagaggacagaacactgctgcccgcctcatcaccccagcccaagaggacagaacactgctgcccgcctcatcaccccagcccaagaggacagaacactgctgcccgcctcatcaccccagcccaagaggacagaacactgctgcccgcctcatcaccccagcccaagaggacagaacactgctgcccgcctcatcaccccagcccaagaggacagaacactgctgcccgcctcatcaccccagcccaaggggacagaacactgctgcccgcctcatcaccccagcccaagaggacagaacactgctgcccgcctcatcaccccagcccaaggggacaggacactgctgcccgcctcatcaccccagcccaaggggacaggacactgctgcccgcctcatcaccccagcccaagaggacaggacactgctgcccgcctcatcaccccagcccaagaggacagaacactgctgcccacctcatcaccccagcccaaggggacagaacactgctgctcctggggctgtagtgggtgtacaagttccctcctcctacggccccttgtcttagcggacttgggaggctcagaggctccagccctgtcttattggtgtttgcaggtccagaaatcttggcacatgacagttgcctggtaaactgccttgaattcattgagtggaacacaatatggtgtgctgtggcacctgatggccagcctggaggaaggggtacttttttctcattgtcatggaggtcccattggctcttcaagcatctctcccaagcatctaggagaggtgcttatttctcattctcacaaaggctctttgtggaccagcacaggaggcctgcctagggcttggatgaaaaatgagcatagagagaagaggttaagggaagcaagctcaagagtgggctcagagaaaagaatctgggggagtcaatgagatggcaggcaaggaacagtctccatttgatgctgatgtttgtgcagaatgactactttataccgtacagaaggagcacacgctcttcttgtggtaggtcccagaaacttctacttgggggtacatgaggcccagctgggattgggcacagaaggtcatggctctgcacctgaccctcaccttaggggtcaggagagagccaaggacacgagtgatgggttagggaggactcaggcaccatggaatactgtggccatccttccatagaggagaggtacaggtggcaaggcaggcaccaggcagccgccgacagggtcaggaaccaaggcaggtccaggaaacagaggccaaaacagcagcaggaacctcaggcttagcagaccactgactcttctggaagtcttttagacgctctgtggtggggcagggacaagtccttggtgtttggccatggtgaagtgtgcagttagggtaggtgagtcgtgctttcttaacacgggggtaaggaaggagggtagagtttcagcagctcctgtttcttgagcacttgctatgtgccagatgtggtttgaactgtttacatgggagctcgttgggtcctcccagcaaagtcctatgtagcaggcactgttgttctttttgcagataaagaaactgaggcaagaaaggtttagtaagttgtagagctaggtattgaaccagggcctaacctcttaacagaagttagttagaggctgttacttgagtgctcacaggttggctggcaatgtgtttggaacccaatgtaatgtcattagattctgcctaaatcttgtgaagaggggatttccatttgataggtaagaaaattgagaagttatcatcagcccgagatcaaacaagggtatagggagtggtgggacctattaagttcagatttatgtgacttctgatgctatgctcagtgatagatctcttcttgaggataaaagtttgagaattagggttcctcgaaaaccctgagatttctttttttgaggggtacctttttgtgttagcagatttaaagagctggccattgtatttgatggtagctgagtaagccttttgaattggagtatcatcaactattactagatttagaataggtatattttgctaagtaagatcttaaagtttttcctttaaacttaggatagctgttcaaatttcaaactcttcttttttcagtaagctggagacatttaaccttttgtcataggcttaaagcagtcattaaacagggtcatttcaatgcaactttttaaacctaactcccctccctttttctctttaattatgatcagtggcttcatttgagcttacctaggatgcatttgagactataaagctgctttcttaaaacttagcaatgttggctgagacaaaccaactgtagaatctcatgctttcataaagaaggttgcaagacattcattcacagttgctcctttattgtgtgtgatgagccattggcatcaaacctgcttgggttgctatcagtttttcttttgagagctggtgacttgcaatttaaaacacacatgggctcaagggtattggagggacatggcagaaagtccttctgctgcctagtgattgagagtgatggggtcctaactctgtgtgaggatagctctttgacacagctcacctcagtcccctttacctaggtttaagttgttagcattttgctgtatttgctccatctctttttttccctgaagtattcagaagtgaattacagacatcatgacgtttagttcctaaatacttcagcccaaacctctaaaaaacaagaacatatttctatataactgtagtactgttctcacaaaattaagactaattgcctaatggactctattacctgatccattatctgaacttccccagctgaccttaaaatgccttttacagctggactgtttaaaccaggattcaattgagaattctgtattgcatttaatcggtgggtctattaagactctcttaacctagaatagtgataaaagctttttactcttggtctctttgcaaactggggacccccagccagcaacaccccacctgggtctcactctaccatgctggggtgccctagctcacctgtgttatagcttgtacctgtgttcagtggttcccgagttcttgcatggcacccaagaagaatgaggatatgctggacattgagggtgaggagggcagagtagaattttactgagcaatggaatagctctcggtggagaggggctgcagtcaggtgcttctctccttcccgtgtggctgggcccagggctttttatgggctcagaataggggaggggcaggctgcaggtagtattggaaaaggcaacatttgattcattaaaaggcattgttcagaaagaatcaatcaggaaagggtgggcagacaggaacagaagttctcgctctggttcgtgggtttcatccgggaccagcagtccagtctttcagccttcaggctgtttttggctcgaaggtggggtttcaccggggacccgcccctatctgcccaggcgtttggctgcttcctatcactatcaatagtccctccccttcaatgacttgtaggaaggttgtttcgcttaccacattccatcgtgtcctggtggcatcatcaatgaatgaacatgttcttttccccatgtttcttgtacgtactgtgtattagaagttggactaaaggcttgatcaaatttgaggcaggaatgggtgaggctacgtgcgactggagggacacaatgactggttctgtcataatcagtgattgaaattgatccctgggtaaatgtgggggcagtctcatccctccactatcaaaaattaacattttttttccccaggtgaccagcaagtaacgaggggaggggctgttttggtactgtatacctgcaaattttaaatattgatttactttacttccaaaggattggaaattttgtttttttctttctttgcccttctttgaaaacattgtacaaagtaaatctccttattttactaatggagaagcttctgaaagaggctgaacatacattgaagtacctttgctcagctgtaagcccttctggatcagaggtcagaccaaagtttgcagacagttggtccctgtggaccagactgaatccacacatgagtttatttggcctgtggagcactgaaacaaaaaaatgcaaatcctgagccaacgtttgggagatcccatattataatacaaatcgagatttccaggtttctggaaggtcttggcaatctagccacactgggcctgcatctgtgcaaggctgcatggctagaggtgtgtgctgggcacacccattaggtgggactgcgcctttctggccactagggaccgtacacctcctgttgttttcatgggggctggtttcccttgctgacacgtggccatgaggtccctcgaggtacaggccggcatttggacttgtcctctgcactgtttctttgttagcatttagaactgacttctcctcttcctcccccattgaggagcagcaccttactctgtgcagagtctgtctgtgatctgcaggctctttgcagagctacatttctctttggaggccttgctgagcagcctccgctgtctagggcattgctgagaatcacaacatcaacactaatggcccttgggccaaaaagtgtttgtcttaaaatccctgcaccaaatagcttgtgcaattactcctgtgagagccccagaggatctaactcttaggctgtttgttctagctgtattccttcccaccccccaaaccgaaatgacattaaaggatagtaactccctcccgcaaatatagataaaaacctctttactccctaacaaccacacaactatttacatttttgtgtttacctcctagtctttaagtatatgaatgcatgcaacgtcctttaaaaatatgtcaatcctagcctccacaccacccagccgaccaggtttcccagagggaagcattggaaatggcagatgggtaaatgcacagagctggcaaatctccatcctgcgggaggcttgctgtgcaatatagccatcgccacaataatggatcttcctaatgatccggaatcactgagcaaagactgtgccatgttcagtatacactaagtgagcatgcagggaatatatgatcagtttacaaacatttccacataagcttttttctctctcccactccagttttggtaaataaaagagcaaactagactgctttctttctctctctcactctccccctgtctccctccctcttcctctctgtccctgtccctctctcctgcctccctcattcactctgtcgtcctgtctctctcctcctcctccttccttccttgcttcatttcccccctcatctctttcttcctcaccctttttaaaaagagacaggagtcttgctctgttgcacaggttagagtgcaggggtgcaatcatagctcactgtaacctcaaactcctgagctcaagcagtcctcctgcctcagcctccccagtagctgggagtacaggcacactaccatgcccagctaatttttaaaaatctttatagaggtgttgtcttgctgtgttgcccaggtgggtctcaaactcctgacctcaagtgaccctcccgccttggcctctcaaagtgctggaattacaggtgcaaaccactgtgtccagccagacaggtcacttttctgtaccattccctgatgttgtgagattagtgagagtccctactgtggaaccttgttcacgttgccctgactcctgatgcatggatatttgctgttaccaaagacacctctgctttaccaaatgttttgacagagtggaaggaaaactacaagacttcttgccctcgttttcttcagtctagaatgatgctggggtcactgagtctgtagggcagagaatctgatgtgttttttaggaagcggaaggtgtctgacacatagatgtttgacaaattttgttaatctggtcagagtgcagcctagaaaattaaattaaaaagctgctgaggagtgctggggtcgcattttgacatagatacaaaggcaccaatagggccaaaagtatgaggccagtcctagggctggtgaagtttggatcccctgcctgacattgtgtcctgagcccctggccccttcctgcacctctccctgagccgccggcccctcctcattccttcctctcctttatcttccgctgtctttgcctgtgcccccacgcccgtgccctgaatctggagtctttgtcttagtgcattctgtttgtctcactgtcttcctctgttttccttttcttgcggggaggaagggtagaaagagtgtaagaagctcaagtatgaggaagggaaggttgccaacttgagatgagtcagaaatgaaagcagttctgaatgtgtaagacaatgaggaaaatatttatttaacaaaaattgaactaccaaccaagccttcaggaacacagccagaaggtgctgtgtagggagaggtgtgcattaggatgctggagcgtggctgccggcatccccaccccaggaggaagggactcgtttctctgaaccttgttaatggttctccccattgtagacaggactggctctccaccccatcctcagtgggtgcagctttggggaggccgtgaggctggtgatcttggggcctcctatgcatctgtgttattgaaggtaacaatgtcccttctacccaaaagtcatgcttttaaaaacgcacaatcttgaatccatttgggaaacatctttggaactccagaatgttgtctttctcagatatgtattgccaatgttgtattacttcatttgctaagaaacattgtcatcgactttataaaattattgaataattctatttgggggagaagcctggaagctaagattttaaaggttatttataagttaagtgaactggcaaattcttaaatggtaaataaaacctttcctacatgctataggtagttatctaaatcagggcctaacaagcttttttatttattttcctgtaaaaagccagatattaagtagttgaggctttgcaggactgatggtctctgacatagcactaaagcagccttgggcaatacataaacaaaggggcatgtgtgtgagctgatggtccacgggctgcagtctgccaacctctgatgttataagccattgattttctacaacatatatatttagaactgggagtgtcagtgttattttgtcatggtttccagattaaactctttcatattgctgctggtcggtcaatgacagactaattctgctagcattgactttctgggccagggaatggggttcctagatagtgcagtagctttttatttattttcttttccattcaagggtaacatgcttaaaatacagcgtatgaagcttttggatatccactgtaaattttaaggtctaaaaatgaatgcaattgtgaaatgtttttgccttagagaaaacgctctcactgctttgtgttataaatgcatgaaaaataatgatgaattaaatgcatacaaacagatgcagacataatttagatgagtgtattgcaattaaaatattgcccactttcgctacggaatattcgttggacttatgaccttagtgtaagtaatgtttaataaggaatctgcaatgtgtaactcctccgtaaattattaaaaggattggcattcctactgtataatatcaacacaagggatagaaaatatgcctggattcttaatgaatgtgtgctaacgttccttctggcataggaatgtgtagtaaatacacttcaagggttgttcgcatttttatccgtcattgttataggcatgttattgtgtgtctcctattgaagaactgattgatcattgttttaagcttctgtgacttttagatgcttaaaactaggcgttcatggtaggaaagtagagaaacatgtggaagaaatactgcgtttcaagtttgggagtggctggtagaaaaatcaaactaggctagtcttatagctttatcgcagttttgttttttttcctagtaggaaaatgatagtattggttgtatattaaaacactctctctgacactgacttgaatcacgtgcgagttcattgagaacagggattttaacttggttaggtgattttaaacattatttagcaaatctggaaaacaaaagagaaattttcaaatatctttcttccacggtggtgtactggctctctggagtgtgatttcatcttctcttattattgcatatgtagtcaagccatcatgttcttgaagtgagacttcaaccactagtggggccgtataattcaggatcttttgtttgtccttacgtagtttcttggcctggaatgtcaaaatatcagaaactgttctttctctggaatcatctgtctccgtgatggcctcgccatctgtacagtcatccaagctagggaccaaagagtcgtcctttactctctcatccttccggctgctgtgtctggctttcagtgtttgtgtagagcaggggtctccaactcctgtggcgtgttaggaagtgggccgcacagcaggaggtgagccatgggtaggcgggcaaaacttcctctatttacagctgctccccatcattcgcattgctgcctgagctccgctgcctctcggatcagccaccagcattagattctcataggaccatgaaccctattgtggaactttgcatgtgagggatctaggttgcacactccttatgagaatctaacgcctgatgatccgtcactgtcccccatcacccctagatgggaccatctagttgcaggaaaacaagctcggggctcctactgattctatattatgaagagttgtataattatttcatcatctattacaatgtaataataatagaaataaagtgcaccataaatgtaatgcccttgaatcatctccaaaccatccaccccactcctccaacccccaaaccagcctggagaaaaattgtcttccacaaaaccagtccctggtgccaaaaaagttggggaccgttggtgtagaggactcctcaagcagcgtccatatctgccctattctctctattcctccacctaggtatagaattctatctctaagacacagacagaccatgttcctgcctgggcaaacacttcggtgactgtgcattgccctgggtgaacgggggtacagaggtctttgtgacgccctgcaacgcatccctctccgagccgcggtgcgctcttcctcctctgtgccttgccggtgcccagaaccacccccttctccctctttgcacaagtgccttgctctctcctttctcaggccagtgctgctgatctgtctgtgtgacccgggtgcacagtccttggctctgtgcctggccctgtgcaggtctctgtggtggcacttagcacatggcgctaagattctccctgataggccttcagcgccgcaagggccagcaccgagtcctgcacatcctgctctagtcccacatcggcccaggggcgttgagctgaggacggctccctaccccgtttctgtgcttggccgactccagcgcccgttcttctgcccctccttggctctgcctccccaccccttggctgaatctctcctcctttcgtgcttgttctccaggtgacttattcaggtccatattttcattacccttgcatttcattaattttctcatttattttattctgtaggtttaggacattctttaaaacatgcaggttctgaattttaataatataaaagtcctctgtgagtgcccatcacattgcttttctgtcctccctacattaaagttagcactgatgcctttatgtttaaggaaagcctcctgcagaggggctctgcccatgtaagttcattggaaggcaggtgtacagcctctgtcacctgaagacctcttaactgtctattccttctctggtctatcgaggtgtattgggggggttacagcaccctctggtggccatattgtcaggtgcatttttgttctagccaaataaaatgataacacaaatcgaatagtcgattggagttctttttcagaggacatcgttaattcacattttgtgtgtttcagcaggtatttaagccattctcgaatagtgacacttatgcagaggagagaatgattttatttaagtaatttctactttttacatagctagttttaaagtagataatacatagtcttaaactttatttcccctttatttctttcttttctgttagagaatttcttaaacttgtagaattatccaaataaaatgccagtcactaaaaaggaataattaaccaatagtgggaaaaaattaaattcttcaaatgaagagtactgtattcatttcatatggtcccagagataaaatgtttaggattcatttttagttttaaatgtttatgaatcagagcttcaacactcttccaggtttctttaagaaaggaatttgtctatctacggattaattaattagcagagcctctctgtgtcaccaagactggagtgcagtggtgcggctgtagctcactacagccttgaactcttgggctcaggcaaccttcccacgttagactcccaaatagctagaccatggtgcatgcaaccatgcccagctaattttttttttcaatttttctgtagatacagggatctcgctatattgcccaggctggtcttgaactcctgaaggcctcaagcgatcctcctgtcgtggcctaagaaaggaattcctcatatagaaaaatattgttatataaatagttgcctatatccatgctgtttatggtaacagctaaggttcatctcaaaagtatttgtatttggctttggaataaaaagaaatttcccctttcatagggttctgagattgtaggagtttttagtatttcaaaaagttaatggaacaatctgtgatgtgaaagagactcagaagaggctagagaggtctttaacacattttttttttgtattgttatcccttccctatagctaactttgtagatgacattgtttttcagactgatgattgtgaccctcaaccatggcagcaacaatttttaatttaaattttttaaaatgcaaggttgggtgattttctctctggatgcttgagttttgtttttgataaaaattctaccaggggcaggggaaagagtccattaagtcttggtgcaagaaacctgggcagattgcctaagtggatatgcatagcaaagaactgaaaacagagtagggggtgctgaaaacacccacagaggaaaatgcggggcggggggtgaatgcatctgctcattttgtaataaagtccttcctttcctttaacatctcttaatgttacaaataccaacaaaaaccatgcatgtcttcagtgggacagaaaatgagggaggcatttagggagaaaaaagtgtcagttgagatgatgttaaaataaagtttattttctttgcagttgcagacattaagatttattctctgggctgttaggacagttcctgcagctctctgtggtgacctgagcattgatacctttttttttttttttttttttttgagatggaatcttcctctgtctcccaggctggagtgcagaggcgcaacctcagttcactgcaacctcagcctcccaggtagctgggactacaggcacctgccaccacacccagctaatttttgtatttttagtagagatggagtttcaccatgttgcccagagtggtctcaaactcctgtcctcaagtgatctacccaccttggcctcccaaagtgctgggattacaggcgtgagccactgcgcctggcctgtgccttggtttctcagatatttctgcccctgtagtgttctatgcactatgcagggaggtcctgactgctcagagcttaaattctgcattcctttattttaagtgtttggccaactgcagaggaaggtaccttgaaagatactccctcttctccctcactgctgggtcccctgtcataggagacctggcctgaggaggcttcttcctggtaacctgggttgtcactgggaccacatcttcccataagaataatgcttcaggttgtatgggagaagcgtctgacagcagtaacttcagcacaccctgagaatggcccttatggcagacacaccggacagcagtcactgaagaaatgagggttgccacatggaggttgctgggaggagggtgctaagtgaaggtgctgtataagctgcatgctttttacaagcagttgaagttctgctgtccagcccagagccactgggccaccctataaataagttcctccaaataaaccctgtgccttgtttgttagctctgggtctcttctttggcttcttcaacttggtgctgtccctgttgaagttaatacgggtttggcacaacacaggagtagacggttacctgtaccctgccagctgtccttgctacaaacatttgcccagagagtggcatttgtgccggttcttaaagtgtttcttgagctgcacattaataggccatgtcctctttcaacctgccctctggctaggtagaacaaacactcttcacctgggctctgagccagctgctcacctgcagcacccccctccttggagatagcttttcatgttgcatcttaccgagttgattgagtattcacttcgaagctccatgctgcacgcatgggcctgtaaatagctttttcgtgcacttgtgggtgtcatttcagatcgcttcatcggatttcagttacccaagtttttacttggttcaccgtaagtttgcaaaaaagactttttgttatcctgaacattgcaggtggaaacatgattaattttgaattatttttgtttaacttctaccctctttcctatttacagcctattttgtttattttaacttccgctgttaagacttctaaggccaggcatggtggctcatgcctgtaatcccagcactttgggaggccaaggcgggcggatcatgaggtcaggagatcaaggccatcctggctaacatggtgaaaccccgtctctactaaaaatagagaaaattagccaggcgtggtggcgggtgcctgtagtcccagctactcaggaggctgaggcaggagaatggcgagaacctgggaggtggaggttgcagtgacccgagatcgcgccccattacttaaaggaagtgggcttgtgttttgtggccttaaggatgtaatctgttggtaggagggaatgagggtgtcctggtaggggtgtctggctttagtgtcaccattcttttaggaattgccatgttgtggggtcacgtcttgtaggagaaacgttctgaagtcatgggattctctaccctcctctcctgctcttggtttccaccagcagcctgcttggtgtggttttgaaatggagcagagatggttttgatgagcctcactggaggtgctgctgagattaccgagaggccttgctgggcacctggagtcaatcatgccgggcactagcatccgtcatcttaggaggtagggattattatcctacctcctaagccatccctggagtggtggcttggagaagttttccagagaaaccgatcagttcataaagtttctgtaaaggattaacacagtgtagtccagaaatgtttgttcatgaagtcttggtttttgggtttaagaaagtgttctcctgtctgggcgtggtggctcacgcttgtaatcccagcactttgggaggctgaggtaggcggatcacgtggtcaggagatcgagaccatcctggctaacacggtgaaaccccgtctctactaaaaatacaaaaaattagctgggcatggcggcgggcgcctgtagtcccagctacttgggaggctgaagcaggagaatggcgtgaacgcaggaggtggagcttgcagggagccgagatggcaccactgcactccagcctgggcgacagagcgagactccatctcaaaaaaaaaaaagaaaagaaaagaaagtgttctcctaagtgctgctcaccctttttcccaaacaggacctaaccctgcgagggagggtgaattaggccatttgtttacagtttcatcagcaccaggcgtgcacggcgttagtcatggtccttgctctcaaggcactgtacttgtagcagcagtatggtgcaaatgtgcagctgaacagtggacacaggttcctggttagcatttagtgccacaggaatgacagggaggtcttaattgtgatcggaccgtgggagctggattaccccagactgtagctcacttccctgtaagcttttggtagggagcttggaattagcaccattagtagaaacagatttcaaagggaatggtacctgttccgtatgaaacactttaaaactcccggtgtccacacgtctttaaaaaagaggcttaaagcagtttcatttcatcaaccccaaactggagaagctatgaatgaccacactgatgaatatgtcctaaaatatatgtatattatataaagtgtaaaaacagacaagcaggaacatactaccagtttctatcacagctacccttaaactatcattggagggcaattaagtgggtacaacctctagctatttggaaatatgtataaaaatgacaaatgcctggttgggtgctgtggctcacgcctgtaatcccaacactttgggaggcctaggcgggtggatcacctgaggtcaggagttcgagaccagcctggccaacatagtgaaaccccatctctactaaaaatacaaaattagccgggtgtggtggtgcatgcctgtaatcccagctactcgggaggctgaggcaggagaaccgcttgaacccaggaggcagaggttgcagtgagccaagatcgcgccattgcactccaggctgggcaaaaagagcaaaactctgtctcaaaaaaaaaaaattaaaattaaaattaaaaagtaaaataaaatgatgaatgcctgtactcttagacccagcactcccagttctgccagttcatgcagcagatacatatgcacacgtacagagaaggatgcaacagatacatatgcacacgcatacagagaaggatacgtatgcacacgcgcacagagaaggatacatatgcacacgcacacagagaaggatacgtatgcacacgggaacagagaaggatgcacaagaacatacattccctagttgacggagtcgcagattagaaacaacagaaaagcgtccattaaacaacagtttgaacctgtgttgagatatcagcatcccttctccttctctcccccactccctctgccctctgcaggttttattctcagcctgattttctccattggatgtcagccctaggctggcatttgcagagagagatggtggctcctgcagagcttacggcctgtattttattgggctgtgttgagttacccctgatgtgagcaggagaatgggatgttctgtaaattggcctctagcccatcgtgaattcatattttttttataatgtgtgagtcacactcccttctgtcttcatttccttttcacactcccagcagatcattctctctattctgattggcattttatacatgaggcagcagaggctgagacctactgtattttgagacactgtagctttatatggcataattaaatcatagtcatcaatcactcttaggaggtaaggattattattggcattttccagatgagaaaaatggaggatgagaaaggttaggcatcttgctgaagtcacagcagacttaagtgccggagttggagctgcattccggtatgcttgcatagactctcttctcatgctcactgcacgccagtcacctggtatgctgaggccctgcctccaggccttctgattcagctggtctgcagccctggcatttccagctcctcaggtgattggaatgaaagccagagctgggagccactggtctacaccaccagtaaatgatcgggttctcacttgatcatttaattaagaatcttggttttctgctttcagtctgagaactcttgttcatgctctcaggcatgtcttcacgcaggaaagtgatctttgaaattaataggtgcttggaaagcctttaagcagcaggcagtggagaaggccactcagtaggaagggccgagcatgaagcctagtgcacaggcttttcaagaccccacggagggtcttcagaaaaatgggtttcctttgtctccgtggcttccagtctttgttggccagcagttgtctgcttcaaatgagctggctctagaggggcctggagaacccagaaaaactttgtgacaacctgacaagtttgtgttaatcttctgggcattggctttctgcacttattgctcactgaatcactgaaccaggcaggtggggtactggagggcaggggatgggtaagaagggcagcctttggaaggaaaatcagcagagggcagggaccggggaagaaggagtaagaagggaaacccttttcttaggttcttataaatcagaagagcaataaagaaaaaatttaaatctaaaaaatacatgattaggatttaaatccagtatgcttcactacatataaacctttgacttaatattttctgtagtagatgaaaataggactttttttgtttcccttctcttcacatggtattgagtttttttgtgttctgaatacgtgttaagattaattatgaaaatcaaattaccagatacttgaaatataaaattagtaatattcaaagacgattaaatgcacgatttccttttctcataaaaaaagaagcagacggaacttgtattctgaaagcaaatatggaaatcacattaaaaatcagaaaatcctcaccaccgccccccacccccatgtgcatttcatttctctttggtctgagttcaagggagagagaatatgaatgtgctgctagctcaggaagcttcagttctaactttctaaagagctgggaatgtgcttgagtctctgttatctcttgtttgcatttttcgctactttgcctccatttgatccagggaaaacttcatggtagggatgtgagatgtattttgagggctaaaagaaaggagtttgaacaaaagcaggacagtgttccgaatgtggaagcaaagagtccttccaaggggatgtgcggccaacgcctctgttcagcgatagtccagctgagaccaggacctgtgcctgatgcccaggccaccccacaggacggtcctccagcacctcatttctcctttcatcagacacctcttcactggcctactgggagaaaacggagatgagtgaaaatgtgcatacagaacatagggctcaaagggaccctagcaccagtggtgctcaagcctgtcccagcattagcgtcacctgggagctccaaaaacatattgttgccaagactcagtccaaagcaagtgacttccttggcctggagtgagatgtgggtggccagggtcaggaaccaccgagtgggtccacctctgcagactgggaaacagagtctgggaggctgcttgttccctcaaggacctgaagtgacatggggaggcaggactagccttggggctcctaattctgtcctggcctgtattccagtgtgccgtggggcacgtccaatttgaatctggccccagtacactctcaagccctgtgttgctctggtcccacagcttctgcccttgactttccatataacagcacattggtggccagggctttgcactaacctacctgcctccaacattgtttttgaataatggaagctaagcagatgcatattaatgcctgcattatggagaagactgtctcttcacaagtaatctgtagttgttagtcttgaaagtgggttaattcattgtctttctagagaaaatgattgcatggcctaatagtcttccagttagtctgtgtggcaaggtagaagccaggagtggattcttagctcctgttgagtgctgctgtcctgaatcagagatcttctctcccgggccactttgtcatgagcaggattttgaaccaagaccttttcttcacctgtctcgggggccctcaccgtgggctttgtgatcccctgacagctccaaaagcctttatcctcatccaatatctggtgaacagctgacacctcctgggaatctttaaaattgttctctaaagaaaccattctgctgcaagtacctatttttagactttataaagcccacgtcaggttgtcgctgcctttctctctgtctgctaagcctgctgtttgaaaggcagcaacaggatcttttgtctttaaaagttcagccccagctggtgcattccccacttgaactccatagccctggtgtgctctggggtacgtctcttccaaaacccaaaccacaggcagtgacctttacaccccaggagttgaaataatacacctggaggaagaaaataacttacaaacaatgagcctagagtataaatggctatgttttaaaaccctcgattttccttgggcgtatttaacctgtacagctagactgttgtgagttttgggctctctagggggctgtccaagttcagaacaagtgcatctgctggcagccagcttaaggagttagcagccctcaattccaataacgaacgtgtaaatcagaattcaggtgtgttgaagtggggccttgcacacatcctggtcagcccagggtgatttcctctctggccagtggttttgggttttttcttcacatgaactcgtctgttgtaactaatggtcactgagtgacttcagaggtagtgatagctcatagtgaagcccgtgacccacagcggtgggcacacctcgatcccttctccttttcctccatccccacctttctctccttacttcatcccttcctctttccacattgggtcatccagcagaagtcaagtatcttctatttcatatctttattgaataagagttttacgatccatgttattgaagtaggtaaatggaatctcttatgtggaattctctaaaaaagaatcaaaactccagtcaaaccaaaccaagtattccaaatcgtttttagggaaaaaagatataattagaaaagactggagagggtatgcaaactattaacattatgttagggtggtaggagtataagttatatttgctttttctgaatttctaaattttcttcaattaacatattgttcaaagtatcaaatacatagaaggaagagtgtgcatgcctgttatctagcaaacacacttcatgcaaagaaactctcctaaggaagtatgaagttatattttatccttatctatccaaagagagtgtgtgtgtgtcatatacctaaagaattagttattaagatgaagcattgcttataatgaaaaagttgaagcaccctaaattagcttaataatggtatatctttataatggaatagtataaagccattagaaatgatgttacagataagtatttaatgttatggaaacattttataacatagaatgaaaagtaaattgtagattggtttgtataatttgatctcatcttaggaaacacataatacagaaatatagatgaaggtctgaagggtattaatgccctaatgtattagtagcattacctcagagaagcaggctcatgagtgtttattttcttttcttctaactaagtatgtatatgtgtaagtgtgtctgtatacaggagatgtacatacacttttcttgtgaagaatctgtattgcatttactactggaagggtttattttagatttagatattaaagttacctctttgagtgagaacctatgatttatacttcttagcttaccttttacctccattatttaaatctgtctttttctgccatcaaatagaagatgtaacagtgataaaaaggctgggtatggtggcttacacctaaaatcccagcactttaggaggccaggggttcgagaccatcctgaacatagcgagtgacgtagtgagaccccatacctacagatttttaaaaggttagccagacgtggtggtgtgtgcctgtagccccagctactcaggaagctgaggtgggaggattgcttgagcccaggaggtcaaggctgcagtgagtcatgaatacaccactgcccttcattcagcctgggtggcagagtgagactctgtctctaaaagtataatattttaagaaagaaaaaacaaaaactagtgataaaaagaacttacaacaaactgatttttaagtggactgttgataattataagggctgagatttttaattgccatttgtatcaatgaataacccccctgtcaccacattttctggtgtgtttggtgtgtctggttcctataggagagacagtaatgctatttgacatgctttattgctgattagaagcctaatctctgtaatgggaagctcagtaatgaagcttgttcagaattgtgttacagtcggttaatgaagctctgagatcaagggcctggcttttgatggcccctatttcagaatccagaggtttgtttctatttatttgggttttgcaggtaagttccctggactgaggtgatctgaaggttagctctgctataataggtaaattgctaagaaaaacattggccttggtatgtacaacttaaaattttattggtgagatagtcttcttacaaaacaatcacgttaagctagaacttggtgtataaccagcatatatactcctgccaccctcagtgtgtagccaaagttctaaattgcatgcacagataacaggcatataattggtgatttcagaaaagttatacctggtgggcagtgagaggcgagccctgatctgggaaaccccagtgcttcaaggggaagcaatctgggaaactccaatgctgggattgggattcaatctgggaaaccccattgctgacaaggtacatggtacaagcttgataaaaacttgcttaatgtcacacttgtaatcccaacactttgggaggctgaggcagctggattacttgagttcaggagtttgagaccagtctgggtaacacggtgaaactccatctctacaaaaaatacaaaaattagcctggtgtggtggcatgcacctgtagtcccagctgctcgggaggctgaggtgggagaatagcttgaatacaagagttggaggttgcagtgagctgagattgcaccattgcactccagcctgagctacagaaaataataataatttaaaaaaacttaatgatgatagcatttgagttggcttttcaatcctggtttcctaaatatgtgagcctggaccattaaactgtgtgacaaggagctgtcatcttaacatacagacattaaatgcattgttcaagatcagaaatgatttcttggttctgaggcactattgactgtgtgtaaggtgccatcgttaatttggtaacaaggggagacagtggcagggaagttccttttgcctgtcttgtgataggcttcctattttctcaaaggttaagatattaaattgtcttaagcaaagaaggtatttaagggcatcatcagggttagttctcaggtctcctgactcctagcttctctagtttagtgattcacgttagcctttcaacagtttaccactcactttaatggtttttcctagctgtcttgacatgcttttcactgcttacatggttagtttcctacctagctgaatgcaggcatctgtgctgtctgctgggttcgctggtggtgatgcagcccacaggtacctgtctctttgaggggagttcagcaaccatctatttatgtcgaaaggcactgtactgggagatgaagaacacggagttctaggcctccaggaatttatcatcacttgctaatttgagctgagcctggcacttgaacataggccatagatttccagatgtgaaaaaaagaaagaaagaaagaaaaggatcctttaatgtatagacttgtctttctgcctgctttcttcacttctgatcattttaaacaattgatatcctagtttgatgtgatcatgttccaacacagcacaacagcatgtatggtttggggcatgcacctgtggcagttgcaaaggtttttacagtgaagtggctaagaggagagtaagaccagtgtatagggtgtggatgaggtcagatgcgagactatttcttgatttgagtcattttatttaggagctatttctttggaatactttatatatgagaatgtacatctgattggaagacagaaggtactgaaatttacctcttgatcaaattattctggtataaaattaaactaaataccaatcatatacttaatttcacagacttgcaaataatatactggggtaatggaagtaagagacaggaccttttatgtggtatgaagttctgtgataattcctatcttcctttgtacctaaaagaggcaccctctcctgtcatactgcaaacagatgccactactacgtgtagacacatttgccagctgtggcacagctggtcacccagccctcatcacagctgcctgtaaaacccagatttattctcttccccctgatcttttttagaaattactggtatcgttttagagagtatccaacttacacacaccacttaaataatgaattttccaatttcttctttttccacggccttcacgtcatctggtaaatattcccctcaggttggcatctgcttctgagaccctgctggacctagatatattcaccagagatgggtgaaggctttggaagagtgaagtggttaggaacatttcttccgatatctcctgctcattgtttttgacctctctgatttccagtatattctctgctccagccacacagctttcctgaacagctaagtcttgctcaccggtcagggaccagctcaaaggctgtccctttttaaatttatttcctgggtcttctcctggcctcttccctgcactcggtggagatgcctgccccatggttttcagtagcgttggctcttagctgttccgttctggggaaggattggttgttttccttttctccatgtgtgttgtgaatttcattctgtgtcaccgcatcacgcgaggtgggtagggaagagaacttttacgctccccgctgtcgttagtggcctgattacgagtctgtgggaaagaatgaaggttggaaagaagatctggtgggaaagaacaagggttgtccttgagcagccaaactaagctgtgagaatgttaatgtaataaagcaggaattctaatgggctgcctgctacagaggagatgggagatggtgtagggctcatgactgtaaaagcaggagccaccagcagatggtgatgcggcctcttggcccaggtgggactctgcatctccccctcccatggacattcacttgataagtgttgggccggtcacccatgccctggtcgttcttatcttatcgaagagtgctaatataagtaagctgtaaattcccattgtaagaaataattgccttttaaaagggagcattcaagaaaaagaccttttggctcaataaagcctttattttcctcaacactcttggctcttaaaaggggcctgttcttggccttgaagtgggaatttacacagaactttaaacagaagaaaccccctctgccttgggctgcaacttgttgtccctggcagggtttgggctgtggggtcatgggatctgtttgtttgaccgttgtatgcaaaaatgattttaaaattggcctccctaatctgttggagacattagttaaaaaaaaaatgagagtaaagaggaaaatattttgctattgggtatgcactggatccatttttaaactgagagaaggtgaaaggggtgactggttgatttcggataatacttttagagccacggggaactgtgaaagacaagaaaatgtaaaaaaagcacattgattgcaggaccggtggtccaaaagcagcacgtgaaagaggtttcaaggctgtttctacaaacaagaatgccaaaggtggcataggacaagaagcttgctggatgtcacgaagctagtggagatgggatccaaagctagttttggctgatgaaaatacaggctcatgccctgtatgtgaggacagtgggacagtaatttaaacagaagtatctagaggagtttccttattgccttgaatgtatttctttttaacattgctatggacatttaggaaaagatgccactgatattccaaaaggggcattccatacacctgagagggatccctgaggctccagggtcacctgggccaagccaggtatacacacgtctcatggcaagttggctgttatcataacttccctggtgttgttttgttgcaagggcagcattgtggggctgtggtttgaattgcttttttgtgtctcttgaatacacgaagttcctcctatagtcattggctctgctgcctctgatgaggcacttccgtgttccccacatttgaatttgctcccgattcgagagaggcaggcatccgcggcagcagcttccaacccagacaggcttaagccgcgcgagggtgcccgggtgggtggctgcgcagggccctacctgggcgggagcggctgcagagccctgtccacgcggtgcctccccagcacggcacctcccactccaggctgttggttacctggccgggagctggcggagaccaggatttctcctcgccgccgttgctgttgttaggggaaacagaccatctgcatctagacctgcctctctctccgctccccacttcagacgagctcttcctgcctggaatctggtaagtgccaccgaaggttccgttccctttattactcgattagtgcccacagcatcaggagaaggttctcttaccgtgaatccattagctttaacccaaatgtgcaggattagggggattatttgaacttgcttgctttctttttaaaatgtccattagacattttttgcatgcttcaaaatcaaaaggcggcacagtgaaaacattttaattatttatgtatttaacctgtatcatcttgtttctaacctcttttcttcagggtggtgcagtcaaaaattacacagatattgctctggtgcctctccccccttttatgaataaattactgcatttgtcatcactgtgttcctgaaatgtcaaaaatagacactgtaaaggaatctgtcatgcagagttcagaaattttcaaatttctgagttcaaaacctcaggtgaagcgaggacagatcttttatttaaaatttgattctttgtaggcttcactgtgaaataagttcaatttagagcatagctaatgcaatcagccagctcgtgatgggacaacatacttctctattgttttacattcacctcctgggatacacacactttctcatttgttttataacctttacaggaaatacctggggatgagtcacatgacccctaacttgagtttttacatgtattcacccagattaaatgattttgctcttatatggataaacgtgcagttaggaactttaaaaaattgtaaatgaggtgcataatcattactcattgtcttttactgcattcttcagccctcaaacatacaaactgttattccctttaagagaaaataaaactggcacttatgttttcctttactctaagttaaagactacccatgttatgtgccattaaaaaagatgtagaaattaatctgtctttttctttgacctaatcttactagcagggatattggggctctacttttctgttctctctctctctttttttttttttttttttttttttttaacatcagccacaggtaatactctccggtaaacatataacttgaggaaaattgaattaggttaatgctggaatagaaaaccagggcagtgcctgctctttttggataattctgtataaacaatgagaaagtctcaggctgccttagacaaaggctgagacgggagctcctgatgatttttatgagggggaagaggagatggtgaggaggagggcaccgagcatgtgcagcaacttgaagcatgtcagaaagaacatttgccagaaatcttcaaaaccgtggcggtcggtaatgtgtgaaattgaacttctgaccctgtttgcttgatggcgacttctcgttgtgcttgagaattgtgtggcattgggtccctggatgtgggaggaacagcaaagtggtttagtgaatagagagggaagtgccttcctttttgggtgggacttgccatgatagagcctgggccgtcaccttaaaaggagatgtttctgttgagagatggaaaattggcaagacaaacgccataaaccttaacctgtttataattccttacctgtaagctgctttgcacgcaaggtgatggttctacctcataagggacaaggaagaacagcacataaacctgactgaatggagtgtggctgtgggtgggagcagctttacaagaaggaaacggggccccctcctgagacacccccgtttgcttctgctccttccttgccattgacgtgcccttctcctgaaactacccacacctgtgtttggcaacaagcggctgccccttgatccagatgcatttttcaacttgcgaactctcacctcttgccaagggacccaagtacctggttaatgatctttaatgtaaatgatcctttgccttgattaacattgagctgggttagtatgcacaggccgagctccgtggtcctcccatgtgatcccttccctgccagccacctgcccacctgtaggaactgggcatggccagttttctctttatgtgctctctttgccttggatggaatttgggctgagaccgatgaggtggaaccaaagctgttcagcagaagagagcaaccacagagcagcctgttgggtggagggcttgagggttcctaaaatccgaggactttctggtgagcctctcccctgagcctgcttgagggaaggcgctgccccacacactctccagtgggtgggggtgggggtggcagcggctgatcaaaggttctcacctgcaagtgataatagcctgggtctctttggcaccaacctgccttcttcacctttctgctcagacaccccttggcacccctacataaaggaaagagctgtctggatggcctagtaactgtaggataggtaaagttagccctttcttctgacctagatatgtgatggtggtatttctacatgtttatgtcgagaactttacaaagatgaaagaaaagctttcagagctgcagaaatgagaggtggcccttttttaaaatttattttaagaaacaacttttaaaaccactttttgaaaaattggatggcaccgtcctgcagcctatcagatttcccttgagaactggggattattggcttattccttgctacctccaatcccaaattaagcagagtgacatgtaagaagctgggtacatcagcctaaagcgtttatcaggtatgtccttcccaactggatcttttctactccctggcccgaattttgttttagggaatggggcctattttaattgctggtggcaaaaggatccctgggcagtgtttccatggtcctctaaggtggagtgtcggggagctgggggacacacagtggtcatgggttatctgtcttggcctctttcccagaccaagttctgtctcatgcttattggtttggctgctagttatagaatctgatgtttaccttagaatcctaggatggaaagggttaagaatgatttctaatttgaattccttgtttctagggagttattaaacctatacattacatttattattttacaaagcactaattcataatagttgacaggaacaactattttttggcttctttgtttttttgtttgtttgtttgagatggagtttcactctgtcacccaggtctggagtgcagtggcgcaatctccgctcacagcaacctctacctcccaggttcaagcaattctcctgcctcagcctcccaagtagctgggattacaggtgctagctaatgtttgtatttttagtagagacggggttttgccatgttggccaggctggtctcgaactcctgacctcaggtgatccgcctgcctcggtctcccaaagtgctgggattacaggcatgagccaccacgtccggccttctttggttttcatattgattatattttctaagacaaatactcatttatatagtctaataaaaattgttaaatctaattaaacaactaataaaaatagttgtttaatccacgttgacatcttcttacattgcgatagaaattttgatatatttatccatatgatgaattgcttaaagccggtggttctcaaccagtggcagttttgccttctctcccacaagggacatttgacactatctggggacatttttcattgtcatattcaagggagtggggtgtgaagctggcaagcatctagtgtgtagaggcctgggtgctgctccactttctacattgcacaggatggcacctgacacacagcctaaagcgtcggtactggttgaccgtatacgaaatgctgtggaagaccaggcacggtggctcacgcttgtaatcccggcactttaggaggctggggcatgaggattgcttgagcccagcagtttgagaccatgtttaagtttaagttcatttaagttctctgaagtggtgattctgatgctatatagatgaaggttggtttgttgaagagctgactctggtatttcatccaacatctgcatttttctttagctaaggatgccttgagaaacattctagtctcttaggcctgaatttgttattagcttaatagctttcctctggttgaatttaaatggaaagaaaattgcatcttgcaacaggaaaaagaacattagggaaaaactgaggaaatggaaataaagtgtggaattttgttaataataaatcaaccttgatgcattaattgtgagacatgtcctgaaccaatgtagatcttaataataggggaaactggcttcagggtacgtggggactctatcttatctttataataattctctaagtctgaaacaaaaaagtttattaaaaaagcacaaacaaaattgctgccattttgttaacagatatagtagtcaatcttactgttttctttttctttgaaataggctgctgcaaaggtatgttctttgttatctcggctctctgctcagggtagccatgaaatggctcttttaaaaatgtgcccagataattttgaaccatttcaaaccatattatgtgattttaatttattttccattgcattcactaactcatttctgggtgatgtatttaaaagactagacagaatttacaggtttaaaaagttacattaacagaaaatgtaggtgccagttgaaatactgtcaactggaagtgctaccagcaatgtgctagctggacaatgggacttgtcccatttttttgctgggtgacagctatcactgcctcagggaggctggtgccatttaatgcctctgataatcagaataagtaattgtggcttctgggtctgtaaagccacaaaatacatatgcaggcctattttaattgacggtaagtcatgaaatacactattttcgtattaagataacgtggatatgttatggaacaaagttaaaaattagcatgaatttttaaagtactactggagattgttggctttaggttcgtgaaccccattcctgcccccacactcctgttagtggggctaccagaggggccagtatgaaaagcactggacttacagatgaaagaacttgagctggaatcaattcgagtcacttaccttcgctacaggtgggcagaggagtcatcctgcaattttgttgtgaaaacagaatgagataatataaaatgtatttgaatacagtgaggtctgtacagatgctgaatctattactttgcagtaggagtcaggtgtggccccacttccccaccttcttacctacttgtatcttagatcttatatatattgatattcacttttggtggactaaggttgtctttgttgcaaacctggactctcttgtattcttgctcagtgtgtgtatgttaatgttagataaagaagattaggctggtgcattggctcacgcctgtaatcccagcactttgggaggccaaggcgggcagatcacttgaggtcaggagttcgaggccaccctggccaacgtggtgaaaccccatctctactaaaaatacaaaaattagccaggcatggtggtgcctgcctgtaatcccagctacttgggaagctgaggcaggagaattgcttgaacccaggaagcagaggttgcagtgagccgagatcacgccactgtactccagcttgggtgacagagtgtgatcctgtctcaaaaaaaaaaagcagaagattatttggaaagctatttttaaattattcttcaaacatatactaaaatagagaagacaacatgagagccaacagcataatgaaaccccatcactcagcctcaaccgttgttaacagtttactatctttattgctactgaaggcagttaaatatttcttggcagtccttttttatttagcatataccatcagggatgacaatagaaacaggtttcaaagtcaggtgaaataatgtttctctatatgagttcaccactaacttgatacacagtttatgtttatgtttatgttcttattacgttcgtgtattaaggcaacctttcatccctgccccctaataggtaactgtctttatttgttctgggattatccctcctccattgccctttttggaaagagtatggatatatttgtattttctcttactcataaagcagcacatggtacatactgttctgagccctggttttctttttttcacttagcgttgtatactggaactcactcaatgtcagtatacagagaattcccttgtctttttataactctgtgctatacgctgacggaagttcattcagtcagtcccctattgatggacacttgagttattctcagacttgtccattgttttgcaaaaatagccctgggcatatgtcatttggtatttttgtcgaggcattccaataaaaataagtaaattcttcctctcttgccttgaagatgtgcagctcctcagtaaccttttattctctaaagctctgtcctcatctttaatccctgatttaagaggtgcagctcttcaggccataaacctttcttcctgcctcaagtttttaaagctacaaaggaacctaagagatcccttgtgttttacagctaaaggacctgagagcaggaaacaaagggagagccggaagcccaggtctcctgttccctgcctggcaggtgatattctttctgttaaactctctttccctctgcctattattggccaggctgtcctccaggacagtgcttgccaaagtgtggtccatgggcagcagcatccccggagctcatcagcaatgtaagatgtcaggccctgccccagaggggctgagatagaatctaccaattactggattccctgggtgactcatgcagtcaggttggagaagcgctggactggtggctttctccagaggagcatgcaacagcggtttgcaaacagggatgatgcagttccttttcaacacgtggatttgcacttcctcctggtgcgctcctccagcctgcctgtcctgttcacaccagcctccccctggaaggggttcagacttgatcctttgggtggtagggtctttcttggatagcgtagccatccattcctgctgcatacattcaacacagccttcatccttcgccatttgtctctgatacttcatactccttttgtttgacaagtgccctagctttatttattttctcatcattgttgttaagggcctattgtgcttgctagtatacacaccactatgtaagttactagttcaatttatttgttttactgctgctgtgaggtgtgtccatgtgtgcacatctacctgtgttaataactgataatattgggcctcagtacatactttttttttttaagagacaaggttttacttcgtcacccaggctgaaggactgagacacacttgtagctcactgcagccttgagctcctggacccaagtgatcctcccaccttaacctcctgagtagctgggactacaggcacacaccaccacaccaactaatttttttattttttgtagagacggattcttactgtgttgcccaggctggtctagaactcctggcttcaagccatcctaccacctcagccttccaaagtgctgggatgataggtgtaagccgccgcacctggccctcagtgcatacttagatatacttaaataaaaacttaattgcaaattacttcttaaattatccacaaactgacttggcagtaaaagtgactacaagtagtgaaaccactgtcataataaaaataaaataaaagtctttattgttagatttagtatttctaatctcttacatttcagttttggaaggtaaatttttgggaagtggtggtaataatctaagtatgtctagattcagtgatgagagctagtacactgtaggaaagagttgagcataacaatatggaatgttggtaaatgtataggggttttctttttaaagacagctttttatacaaagaaacagatgatctttttttttttttctaaactatgttagctatacccaaattagtaaatgttaaaataaccatgactggtaaaaacattttgcaattttttttttttttactttttatataattaaatgaaattctccatttggtagttgatctctcagacaaattaagtcttgccagactgtctgagaagactagtgaatcagaccctaaaaacttgtagcatttgaaaaataacaactgtgtactgcaatttataagggcataattagagaaagtttttcagtctgaagatttatactaatcttatcaccctggttttagagaacccagttcaatccaactgctgtgaaaaagccactgcttttagccacagaaaataaccagtttcatagaatgacttataataaaaaattcaaccattttgactccaaaaacctagctggccgggcgtggtggctgacgcctgtaatcccagcactttgtgaggccaaggcgggcagatcatttgtggccaggagtttgagacctgcctggccaacatggtgagacccccgtctctactaaaagtacaaaaattacccagacgtggtggtgtgcacctgtaatcccagttactcgggaggctgaagcaggagaattgcttgaacctgggaagcggaggttgcagtcagccaagattgcaccactgcactacagcctgggcaacagagtgagactccttctcaaaaaaaaaaatgcctagctgactttatcatagatctgtctgtaccttgtaggcacaaatatatttacaaaataattaatggtgatttacttattcacaataagcagttattttgcttttggtgtatatgtgacaaggtggttatgtggagtacataaaggagtaaagtaagtccgttgacttcaagatgcttacagtctaatagaaaccttgaaatttccactgggcaaggttttcttgggattgctccaaccaaatgaatgagcaggcgtctaagtaaatgaaaatcactctcatcactttccttcacattatgttaactggtgacaggtcatgacgcatgggaattgcttatgtttctgagctttagtcttgtaaaaataagtttagatagtccatcatgttcttcacattagacactcattacataaaaggttttatatgtattgtagatctttctgaaggtcatctatgtgaatgtttaaaaaagaagcaagaaggtgctataaaaagcactagaggtcaaatggtttgcgagacaaaatgaaactctccagctctgaaatccaacagagtatgatgaagaaagggaaaaaatagatcaaaaaatggcaggggaggaactcggcatcaaaccagtgataaagcagaatgtggatcagatccagacatccagtagtctgtgagcatctccatatgggatgtttgggttgagagttcaacccatcaaatacattttatccataaccataagatattctaagatcgaccaagtagagtaagcaatgtagaatcaaaggtatcatctttattatgtcctatttgtgtttcctgcttttgaggttcttagtccttttaattaactcctaatgaactaatatagttttgtggtcaccagcttctagctagtacaggcacagttgtgggttggtaggagaatgagcagtaaagccatgagctaacacaccaagtaatctgttgtgttcacaaatgtccaaaagaataacagagattaaagaaaggtaaatacagccacctggcaaaaatatttacccttttaaaaatgatggaagttatatatagaagaaatgtttttggtaaaaatatttgaaagtttgttttataatcataagtagcttgggctattttgactagaggggtgtgtgtgtgtatgtgtgtgtgtgtgtgtgtggttggcagggagagaaggagggaggcaggcagctggtagggactgtggagtgtgtcagttgggagagggaaatgagatgattaagttagtaagaatagaaaacatgtaggaaggcggatcttgaaatttcagggctattcattagtcattagttgaagatttcacagagaaatggtagaaaccaccagtaattaagaaatagcattattgtttaaaaaaaaaaaaactcccaaaccctttccctggcattctggtagaatatagttttggtctaacccaggtcccctctcatttcctttcacatccccttggttctagccacgctagactgtctgggttgtctgtatatgttctgatgtttgttttcctctgtgctgttcttctggcctcagaatcctagtgtccttgtgcctccttctgcatatgtctggactttgcttagctgatgagatccagttcagataccaccttctgtacaatggcttccttaattcctttaatttctcttaattgcaataaagctatttgcagaggaatgaaagatgctcccctttgcgctgggtacaggatgcactgaaactttcagcatggggcgcggtggctcatccctgtaatcccagcactttgggaggccgaggcaggcggatcacctgaggtcaggagttcgggaccagcctgaccaacgtggcgaaaccctgtctctactaaaaatacaaaaattagccaggcatggtggtatatgcctataattccagctacttgggaggctgaggaaggagaatctattgaacccaggagacagaggttgcagtgagctgagatcgcaccactgcactccagcctgggtgacatagcgagactccatctcaaaacaacaacaacagcaacaacaacaaaaacccaaactttcagcaggagagtagcttggttcagcccagcaacatcggtttgaagattatatcaagttttccagtcaaatgtaaccagtttatggatctgtgtttgcacggggtctgaacctcccctcctcaggtataagctcttggaggacagcctgctgcttaaggtacaggagaattcatctttgctggacatggtaacgtatgcatagagatctggcaacagaacttaagatatgtgggagaaataataggcaaaaactggaaagagcacaagtaagagaagagaaatccgcagaagtgagaagtaacagaattgctggctgaggttggaggcatttaagtgtgtgggtgtttgtgggaggcatggtggtctcctgttccttgacctcattgggcaaatattacagcacgaacatacaggtaggaatcaattgcatccccacctgggcaccttcatcggcagttggggtacaccacttgctacagtgtgatggaataagggacgatccaaaggcactcagttctcccacccatcctgtgcacaaggaaaagacctttgaattgtgtctcccctgttgtcctttgcattgtgaaagtgcatattagttctcccatccactcttttctctttaagctttagcatacggttgtttgccaagaatggaatcagatagaatattttcaccaggaagtgaaatttaaagtgcttgaaaaagatacaaggatatctggaagttccaaccggcgccattttatattttaaccatgacaagtagctgtatatcatggaactttggaaaacagagattgttccatttatttttcacagatgaaaaccagagtgctgtgtggggatcaggaagagggaaatcaaccaaatgccttattttagagattttttttttttttctgggaaattggaaacagcgcttgtttatagccaatgcagcgtccttgaaactctcctacttacagttctggagctgtagtttcctccctgaagaatgggttaaggcaggcagggtaatatgcatagatgggagtgagagtggatggcctacagggttgttaacctctagtgcaacaggaatatatgaaggtacttgggctggtggtcctgtgcagaaccagccagtaggttctaagagacttgatagccgagggtccctgggccctgttccacctttttaaaatttctatgacttagtagcggcagtaccatgcccatcccccagtgatgtttggggtacagctgcacccttggccgtgcctctgcactcactcacgagtgtcatctgacatctggctcttgaccaggatctgaggttgcttaagcaggatccaggtcaggttttttgttcatggaaggtggaattttggacctttcccccaaaaagttgacataacttaaagagaagggaggtatattgagaccagcctggccaacatggtgaaaccctgcctctactaaaaatacaaaaatagctggcatggtggtgagtacctgtgtagtcccacctgctcaggaggctgaggcagagaatcagggggcggaggttgcagtgagccaaggtcatgccactgcactccagcctgagtgacagagtgagactctgtctcaacaacaacaacaacaacaacaaagagcagagtggtattatttcctcactggaacattaaatggttcctactaccaaagagttcctgttctaatgggggtttaatataatagtaacattttattcactgggattcactcgggggaaagtattcaggaacaaagtgacaaaattaaatataggacatatgaacattgtcattttggttctagttcttacaagggcttatggtagcaacccaaatagaagtatttgctctaactaacagataaattattagcacttcagttgtttacatatgagtcagagcatctaaaatttgttcccataagtaggttgagcctccttctcagcctgttgtcatagggtctaaaaatggaaacgtgagtccaaactctttccagatcataaaaataattctgaattagtagagcataaatgaatgtgattttattcgagtgtcattttcaagttccccaggccaggttgagaccttttaagtcatctgaaattccctgtagggaggattaagaaaatagtagcagctttgcttctggccttagacagttttctaatgaggtcagagcctctcaccctgggagaagcagattcactttgccccttcagcattggtttttgagaattgctgtctgaagctattgcatagacaaggtcactttttaaaagggtacatttctgaacctggagaaggagtgggttctgaatgactggctcttctgattaacagagctgtatatcaagctgtgctgaaaatactcctcagatatattaggccacatttatgcatgagtgagctcactgtcgtgacatgggagtgaacctttgctgattcgagatcctggggtgccttcactttggaacactgattctagatatttaatagcagttttaaaattaggctaaatgtagtctgactgcaggattcattccagtgggaatttttttgtttgttggttagttttttaagcctgaatatgaacccaaacatgtttcccaaaatgtgaaatgaagagtgaaaacctaacaatgggataagaaagataatagataagagattatagttcaaactcggcctgcactcaggaaatggaagcaattcctccccctcatcctgcccccctcctcctccccccctcctcctcctccacctcctcctcctccctttcctcctcctccactacttcctcctcccccttcatcctccacctccacctcctcttccacctcctcctccccctcctcctccccccctccccctcctcctcctctccctcctcctgccccctcctcctcctcctccacctcctactgcccccctcctcttccacctcctcctcctccacctccccctcctttacctcctccttctctttctgcacaccccacccccgcccccactagggacagtttactcttccccctcctttcttagaatgccaacaactagcctgttagttccattacttacttgccttgtgactcataacgttttcatcttgggtatttttctttcttggtctttgtaaaaattctaagcatcatagagcatatcacctggagaaaagacctacgttcattatttaatgaaggtaaaaagtaaagaattgagtctgcatcctaagaaattagaaaaagatcaactaagtaaacaaaaaaatataaaaactaggagggaggaattaggagatgataagatttaaaagttatgtaaatccaatagctggttatttgaaatgaccaataaagtaaactctcattatcctaactcaggaacagaaagaaatcatcctaacttagaactagataataggaatgagaggccgggcatgatggctcacacctgtaattctagcactttgggaggccaaggcgggcggatcacctgaggtcgggagtttgagactagcctgaccaacatggagaaacccatccatactaaaaaaatacaaatttggccgggcatggtggcttatgcctgtaatctcagctactcaggaggtgaggcaggagaattgcccaaacctgggaggcagaggttgcggtgagccaagagcactccattgcactccagcctgggcaagaaaagcgacacttcgtctcaacatcaacaacaacaaaaaagaaagaaatagataataggaatgagaaaggagacacaggagatatcaatagactttataagaaaacattacatgcagccctgtggcaacacatttgaaaatatagggctgacttcttaggaaaatacaaattaccaaagttgatccaagaagcatggaaaagttgaatagaccaattactatagaagagataggaaagatgattaaaagttaccattgagaaaggcaccaggaatccatggatttccagctgaggttttgtttgtttgtttgtttttggagatggagtttcgctcttgttgcccaggctggagtgcaacggtgcgatctcggctcactgcaacctccgcctcccaggttcaggtgcttctcctgcctcagcctcccaagtagctgggattacaggcatgtgccatcatgcccggctaattttgtatttttagtagagacggggtttctccatgttggtcacactggcttgaaaaaatagaaaatttgagtgttatttttactcttccaggacatactaaaacatggaaaggttcccagttcattttataaaaccatcaaaattttaatttaaaaatctgatgaattaaaaaaataaaaataaagatcaatattatttatgaaagtaaatgtagaaatttaaaataatttattaacaaatagactcttgggtgcatcaaaacacgaatgcactataatcaatagttattttccagtaacaccagggtgattaactgttagaaactcatcactatcatcagttgttacacaatcatattgaaggagaggaatatatgaataagtcagtagaggctagaaacctatctgaaaaagtttagtagccattcctaatatagtacaatctgagaaagcgaactaggaataaaaataaattacttaaacataaaggccatatatgtgtacacaaacacacacacaccacagcaaatatttcctaaaagacaaaacactaaagccattcaattaaaattaggaatgagagaagaatcttacattttacaattagtatttaatattatcttagaggttcttgtgagtggagtaagacaatgaaatggtcatatgtctagaaatcgcaagagcatctagtaaaaaatctaaaatcaacagaaacaattgtcaaggaagctggataaaagataggtctctagaaattatcttttctgtgttttgaagataagcacctagaaatggaagttaagtatttctttcacaatagcagcagataacctaggaagacattgaactaatacctgtaaccttcttagtgaagaatgtgaaatataatctagagaaattaaaacatgtaatgcctgaatgtatcttattacaaaattaataagtaaatttcttgtgattccggttagaatttccaaagtggtgggttttctctttaattgaataaaataatcctgaagtctttatagaagaataaatacgtactacctgagaggagccaagacaaatatggaaaagaaaaccggtgagggcagatttggcttacaagtaatgacaacatgctaagaataagaagtcttcgtgatcaaagcaatgtggtattgatccagaattacataaatagttcagtggaacagactagagaatctaggactgtgtctcattaagagagtgaatgtataacaagatgatagttcagtactgttgaggttggtactggcataaccagttctttatctggagagggggttgggggaacagcacagacctctatctaatatcataatcagtaataagtcccggaatcttcaaacacttaaatgtaaacaagcaattcaacttttacaagaaaatataagaacctattttgtataatcttggagtgagggagaatggttaagcaaaatttgatacgcacaagctataaaaagagacacactttgaacatatattttatttttatttgtttattttttgagacggtctcactctgtcaggctggagtgcagtggcgcgatcagggctcactgcagccttgacctcccagactcaggtgattctcccacctcagcctcccatgtagctgagactacaggcaagactcactgtattagttctcatactgctaataaagacatacctgagacggggcaatttagaaaggaaagaggtttcacagtttcacatggctggggaggactcacgatcacgggtgaaggtgaatgaggagcaaagtcccatcttacatggtggcaggcaacagagtgtatgcaggggaactcccctttataaccatcagatcacatgagatgtaattcactatcatgagaacggcatgggaaaaacctgcatctgtgattcagttacctcccaccgggtccctcccgtgacacgtggggattattacagttcaaggtgagatttgcatggggacacagagctaaaccatatcagctaccatgcctagccaattttttgtggagacgaggtttcaccatattgctcaggctggtctagaactcctgttctcaagtgatctgcccacctcagcctcccaaagtgctgggattaacaggcatgatccaccatacctagcctgaatatatatttttaaacttttctgtggcaaaagatacgtgattaagtcatagatcaagaagggatatttgaaacagacatggggttactatctataacaaaaaacttacaaattgttaagaaaaccacagaggaaaaatggacaaagaatgttaatatagaatacacagataacaaatgcagacagctagctggcaaacctatgaaaaatagttcatttttgctagggaaatgcagattaaacaatgagacgttactttaaacccatcagattggtaaaaatagagaaaaataacactttttgatagcaaggctgtaatagaagtggcaagtggtattatttctcataatactgatggaaatgtgaattatgggcagttgggaaattgaaaagcagatgggcaatgtatattaaaataaaaaactatcatacctttcttctaagcaacctttgtcctcggttatttgtcttttagaaataaaaaatgtgtgcaaagtcatatgtataaggatatttattgtaccattatagtggcaaaatactgaaaatatgaaaacccatcagttgaaaaacggccaatttatggactgtttgtaccatgtaatattatgagagaactagagctgtatgagagttggctgtggaggaatttctatgagaacttgatgaatgagaagcaatgtgtagaaaaatgtataatatccagttctaaaagacgcattcctcctgtgcccatatgtgtaaatgtgtgagtgtggagaacaagatgaaaatgctcattctgtatgttaagcagggagtggggtggaggttaatgtggaatggtgggagagtggggtggcagggatttccaagtcactcaccagtgatgagtgttaaccacatccccatttttttcctatgaaggaagctgcaatgctgtggtttgaggttaaacatgctggctccttctcttaggtcttgatttggtttttgttgttgttgttttttttttaattctagtctgttcttgttttgctgtgctgatatcctcttagattttacgagcatattaattgtgagtatttaacattcttctttggtttattctgagaccccgtttgcctgccctttggcatcattggcagtttttggtggtctactggtcttcctgtttgtgcctctcgtttgcccctttttcactggaatgtgccaggttgaagcaatatgtagggcccggtgggatgggccaggaggtggcctttcagatgtggctcctgcatggccctgcttgctctcttgagctgcctgcacttcagtcttaggaccacattcctgctttggcctacatgaagtgcaaggtagcagtgggaaaagcagagaggaaatgaagcttcctgataaatcacctgatcgctgccccagggttagtcactctagcccccttggatctcttgactccatctcttgatttgtttcttttgaatttctggcatctggagaatacttgtacagcagcagtcccctggttttgtttttctttcaacccaagcccatcccatatctgttcatgtgatgatactgtgtcttattttcccaagattcttatgactgtgatatttagtctgaatcagagaaagagagagatagaaatgtacactcagagggccacttggatggaaacttctgttgatctctccaagccttagtgggatcatctgtagagcagggataataacagcgcctatctgttactgttagggttactgcaaagattaaaataggtggtgctcttaaaagacttagaacagtgctgtcatatagtaaggattccataaacattagctgctcggtttgtgtgtgtgtgtgtgtgtgtgtgtgtgtgtgtgtgttttgttgttgttgttgttttaaacgggatcatgctggaaatgatagattgcaacagagctttggggttttttctctaattaatagatctaggatgttttctgaggtgtgtcatgtttttaaaactctgtggtatttctgtttctttctttctttcatttttttttttttttttgttgttgttgttgagacagagtctcactgtgtcacccaggctggagtgcagcgatgccatctcagctcactgcaacctctgcctcccaggttcaagtgattctccttcctcagcctcccgagtagctgggactataggcatgcaccaccatgcctggctaatttttgtatttttagtagagacagggtttcaccatgttggccaggctggtcttgaactcctgacctcaagtgatccgtctgccttggcttcccaaagtgctaggattacaggcgtgagccaccatacccagcctggtgtttcgtgatatatctatgtgtgagggtttctgtagttaagttcccatagttgaattcctggttcaaaggacaagaacatttacaatgttcatagacgttgggaaattgccttctgtagtactgcactagtttccactggctgtagtggttgatgagagtaccagtttttccctagttcaatattaacccattttatcagtcttttcatcttcgacattatggaaggtaaaaacatctcattttatgtcttcagtcagtgatgccaagtatctcttcgtgtatttatatttccatttttatccagtgccaactcacatccttctgtcaatttttcctttgacctattaatttttcattgataagaattctttgtaaaatgggcagtttaactccccatctgtcatatgttttttctcatttgatttattgtatatcttgtatagcaccttttaattttaacattgtgtttttaagtgtcttttctttgttgacttggaaagctaacaactacttacagcataatttccttctgttaaaaacaagaaggaatttccccactctaattgtgaaaattatacatttttctaagtctgaaaaaaaatagaggaaaaaacagaaaaaacaacagaaagaacatcagtcactcttaatattttggcattttccttttagttgttttttaggagagaatgtatatttatacttcgcatcataacatagatatagtctattttggtgatttattccaatatgtaatatatgtttctgaatgtacaatatcctatttatcatatctgttaagtttgtttccagtttttcatttaagagagaaaggtactgggaatatctttgtgcaaaacaagaatttttttttttttttagtcagattctgttcctatgatacctccctggaaatgggattcctaaattaaagaatattaggatttaaatacttttggtatagattaccaatttgctttcctaacgtgtggtactagtttatgttgcaatcagcacaaagactcactgtgccatttatcatcagcagagaagagagcagccctgaagatttgggggaggagtgttcgtagagaggcacgtgaaagtgagtttgagaggtttgagaagtagccaggtcagtggggctggggaagggagagagttcatgggggagggctggagatgaaggtaaaggagccatggttctttagggctgtgtgggtgctggggaatttgcatttcctgcttaaggttgtagtaagtcagcctggagagttgcaagaaaggagtggcttggtgtgatttattgtagcaagtgagagtgacccagaggccagttaggaggctgttgcagaggcctgagtgagagaggatggtttaaacaccaaaatggtaacattcagaatggagaggaggagatggtgggagattaaatttggggatggagcccttaggatctgttgattgactggatgtgtaagagagaaagggaagagcagaactgaggaaatgtcctcttgaactggctgggggccactgagatgggacagatgcgctggggagcagtgcagaggtggaatcactgctccttttaggtctaaggcatcccttagatctccaagtggatgtgtgaagatggtggtagaggagaatggagctcaaaagaggggccagagtcatttccatttagatggtctttacagcctaaggaactggcagatttcactaaggttgaggtctttctttcctgtgaaaatgtgatcaggatcctaagtaacagccctaaaaattaaacattaggaatacaaggtttcataaattaggaactgtctgtagctgccagattctaaatgttttgaggatacaaatcttggggtcttttcaaatgctttgagcagaagaggtacatcgtattgtgtttactgaatggcatttaaagatgcaggagacctttcccccttcttgatgaaacaatttgcctttcagatgttttgttatagtgagttgattgtaggaccttatgaagcatgtaaaccacacatttgtaaggcattggaagaaaaagctaacgcgagttaggagggatttaagaccatgtgaggaaattcaagcctatgttgttatcaccaaaccttgcctgtgttatgtaaagatttttgcctgtgtcatgttatcttcgttgtgttcaatttattcctccccctccaagtgtcctagtttctcctctactgtagctggttttgaacaaaatagagaaacttgggtctcctctaccctcagcatctgaattcttctcatttggttactcactgtgttaaaataagtgatatagtacattcttagcagtttgtttatttttaattttattttttatggggctagggtctcgctctgtcacccacgagtgtggtgccatggtgtgattgcagctcactgcagcattataactcttgggctcaagtgatcctcctgtcttagccccacgagtagctggtattacaggtccatgccaccatacccagctaatcttagcaatttttaaataacttttttttccgactgtaacagatttagatattggaaaagataaaacataaagcattgatctacctgtagagccaaatagccacagggatataaattggttaccatttaattttatttccatctatatttggctatatttatatttatgtatatggaaatagtttatgaatttggaatcatactatgatattttttagaatgatgctttttaaactattttatggtaagcattttagtaaagctcgtaatgttatttttaaaaacgtacttttcgaaggctgcagagtatggataaattcatgatgactttttagaggaaaatatcaagatgatctcactaacaaatcctgagattaaaaacaaaagcaaacaaaatacaaaaactgaaccatctttggaatactatgaaattcagattttatgttcttaataaaatcctgttttgaatgaaatcagtcttcatgcttttcttattccttttggctatgttgcctacagttgaattaactgtttttatatacttcctttgctttgcattgaaacaagctgatccattgtgaccctttgtggtatttcataaaaccacaccctaaaaactgcccagtcttttaagtgtagtcaacagtattgagcaattttttgggtaatattgtcggaagtgttaggtgccaaccaacaatggcttattgcttacatttaagtgtaagcaatatacaattaaaggaatgtcatgactttttaacttcattttgaaatttgagtttagaaaaaattccaagggaaatgagcaagaatgaaagcatcctctcctactgccagacttctgggagacccacccctggtcttcccaggtgtctcttcagtgaccttgttggtcgttgagggctgtggaaagttctagggaggctgctcgtccctcctctccttttgcttattgcattctgcccagattataaaactgaagtatctgtcttaagacgccagcagctttttcttcatcaaatccagacacatcgaatcccccacaaccaagaattacccagccacaaaatgtcagtagtgccccggtaaaagaaagctggttttagacttagtctcagaacctggccatcttccatggattatcccgatatgtgcatccttgtctcttttcactatagcctggtgatcatggtggcagttttcattttgggacactggtgaggttagaatagcttcaggcttccctcagtgaatagtattgtgaaggcagtggtggtaacattgtgttggagctggtgtgagggttgaatccactctgtagcctctgtccctagatcatggcgctgctttgattgggccctaattttctcctctagacaaaaggaattgaactaagacttccagcattccctccaggcttaacattttttcatttggtgctgatggtcactgactattttccagttacattttaatgcaagtttggcagaagccgatttctctgggttagggaaaatgacataggtggcagggaggtggatgtacaccatttgtttgatcagtttgcctagaatggaggtggcagaattggagttggaaagatcaaatgtagcctttttttcccttccagaatgaggcttttctatgcatttttttgaggcatgagaacctcatgggacaaggcaaaagtgagcatactcaagtgaagtgtatggttatgggggaatggttattagaaatgtcaattgtctcaattttttagtattaattttcagagggaaacagtggtgtaattagtgttgtgattgtttgccagggcggtcgtaacaaagtagcacagactgggtggctcaactaccacaaatttgttttctcagggctctggatgtccggagcctgcgatgaagcaggattggcttcttctgcggcctctcttcttgacttgcagatgctcctctgggtcttcccaggtcatttgtgtacctgtgtccgtgtcctaatctcctgttcgtataagggcacagtcatattggattgggacccacctactaacctcattttaacttaattacctctttaaataccctctctctaaatacagtcaccatctgaagtattaaagacttcaacttaggaattttgggcaaatacaattaagcccatcacaatcaggtaacatttggtaggacgtgtagatgctttttatctttaagggaataggcaaatcgttaaaaataaataaataaaaacttgttcaacttgtttaggtacattttcttatagtgtattgtggttcttatttttttaaccttccagctagtgtgtaaattggaaacattgtagcttaatttgatagttttagacataatcaaagatgatggaaatcttgttcttaaatttagtctattcagcaacttgtgtatcctcaactgctgaagactgaaaacttgagatgttcctcttgttttaagaatttgactgaaaacgggctgggcacgatggctcatgcctgtaatcccagcactttgggaggccgagatgggtggatcacttgaggccaggagttccagaccagccttggcaacatggcaaaaccccaaaaatacaaaaattagtggagcgtggtggctcacacctgtggtcccagctattcaggaggctgaggcacaagaattgcttaaaccccagaggcagagactgtagtgagatcgtgccactgcactccagcctgggtgacagagtgagaccctatctcaaaaaaaaaaagactgagaatggttggcactgtccccctgtctccaggagggtgaatgtttctagctgaaccctggtgcccacttgctcctctaagccttcagcagtcctcccagcctcaaggggtgatccgttcatcttccccccacctctggaaatcccagcgtttgaacgctggggggaactgcaagtctagtttacagggtttctcagctgagatgccaggaacacttcgcgagtgagcatgccaccacatttgagtgcatatagaaagttagctgtttgctacaactggggacacttcctattagagccgcatctgctggggtggagggctgcatgggttggagagtagggtgtgacttcttccagcaagaggaaagagaagtagcatagtgcccatcgcaggcagagagcacatgtttgacttgctcttggaatttctgtagagtaagggtggtcaggttgccagactacccctcaaacgaggacatggtgctgctgggtcccagggtagagctctgctggcaccttcaaggccctgatttacacctaagggcacacaactgggatctgaaaactgggatgcacagtacagactgcagatttacagggcggggctgtctctcatctgactattgattcttttgggggctgtagtttgtatcatagttatttttgttcctgtttttttcccctcttcaagacaataagcttttggagggccaggaagttgtgttcccatctgccgagtgtggggcctcgagggccagaacctcagaatgtagaagctgagttagtttgtggcagggtgaagggctgacctctactgttggaaatgccaaaatctctgatctggctttaaataagcaaaacagccccgccagacatagagtcatccacaaaacctcatgacctctgttattgcccatcctgtgtggaagcccactgagaacttcacttgaagatgctgcaggaacaactgcagggaacctggagataaggccccgggtgatgatgtaagctaattgctgagctgggtggagctacttaaccttatggtaggaggtggagcttgacgcaacccccttttccaccaacaagcatttctttctacctgtcattgaagtgaatcatcagtataagtagcgagctgggcgcattccttctcagttgtgttaaaacttgctggtattcccccggtatcagcagaggtgtgtacgggcactgctttaaaactgggaaggaggaagacgaggccagggagccggagggtcaccaaggtagatttccagcagcgctagtccagctgaacactttccagccttgtttttcagcagctttgaggaaaagtataggtaagaacaaagacaccactgtatgtttgctatatgaatgcataacatctgttcttggtgtgagtttgatgttggtttaatactgtttttatgtcagcggcatagttctagcatgtaccaagattttcaattttaaatgctttttggtgttcacagttagctataattggtcaattttaccctccttatgcataaaaagaatgataggcaaagaatgagccttgaaaagaattgggatcagaattctggtcccctgttctttgcttcttaactttcttgactgtttagaaaaatgtacagcttttcttccaaaaaccaaagcaataatacttttatttttgaaaataatggaaaacagagaccgctgaagttctatgaatgaggttttctgttttagaaatcacaggttgaggaggaaagaattgtgttttccttcctgttctgtttcgagtctcagtatttctgacttagaaacctcctggagaagagggagataccagctctcctttgtttcaagtaaaataccatcttaggtcataaaatagtttgcttggagaataattcatggcttatatctgaatttttggttggtagcaacagaaatctttctcttcctcggtatgagtaatttggcttacatgatttagactaaattttattatattttttgtttgagaaaacaaaagtcaaagcccagaacatattcaactgagtttttccctcaggttttctatcattttcccacccttcctactcatacatgtgaatatgctgaatgattaacatgtgatttttgtttctttactgtctcatttcatggtgattcataaactgttagttaactggttatagtgtatccatatgttggcaaagcttgaaataaatttgagtgcaggccacaccttcgtattaatgagccgggttactttcagtaaagtatttctgatgtcattaagtgttaagatggccggaattctaaagacaataaaaatgtatcaacaatatgaaatatcaaagcctacagtcaaatctgagttattctttagtacttatttcatagctattctttaatgtttattctttaatacttatttcacattgaaaagtactttacacatgtttgaatgagatattgccagtgaaagaaacaaaaggaagcaaataactctataagggaagtgggattttaaagtatgtttgtgctggccccaggctggtgagtgagtttcattagcaatgaccaggaagagaaagaatgccacagtggtgggtgctgaccttttttttttttttttaaaccttttttaatgtctgtaaggaatacaaggtgaactttaattcttgtgggaatctagtaagatggaagtcaagaagagaggaagaaatgctttttatttagttaagaggaagtaaacatctgtattagttacagatgttatgccttaacctttttcattcctattgtttttatgaaaatttgcctttttaagttaaatgaaggttttctggagtcctgtattgcaactaaatgttgatttaaaacgacacatttgggacattttcttggcactgtggaatataatgaaaagatataaaatgaaggcaggtatgaaattatatgaattctgctacttgagtgtagaagttttattccaaagtggtttgtttggtggatgtggtgatggtggggggctctatgtacttattaaggcaagtgatgggacaggagcttttgtggtcttgacggttctgttgggatgggagggttgtttgggatttttatgtttcattccaggcaatgtttattttttcagcctgtacttcttagggttttaccaagtcagttttcatgtgaagccattttcatatcgtttctttcaccttgatggaaatcttttccttcttatgtgctttgagttaaatatgatgtagtgtgctagtaacatagacggggctttcctttctacaggtgggcttgaagtgagcctgccactcgctcaccttgaatcacggaggtttcagaggccgttggccttcagggcaatggcagaagcacatgttctctgctgttttctgagtctatcttgactgcgttcccagtggcccagaattccccaagggtcactcgacacaccctcgtctacagtaaatatttgtgcttcctctgtgcctggccaggttttctcagtacccaggagcacaggtgggcagtgggatgtgggcaggcggtacccagattccctcccacaggggccacagggaggacttgggcgcttcctgccaagagccccctgcccttcagactaagtggaaatagagatccgggagtccagtggactcagtggagttccgtagaatacatggaaaacgcaccgctttcagtgatgtaagctgtcttgttcacttcacgattactcatctggcctgcagcaggcaagaggatcacatgcaattataaacagcctcctctgactaaggtcagtgactggaaaccctgtcacgttatcagaggtcatttggtcatagattcttgggcagaagccattgagagtcctgggggtgtgatctttgagcctttgccagtgctggggtttgactccttttagctcaattaactgggtccaggagtttattttggccgagatctgccatgctgagttgacaggcttgacactggaaggaagtctctaacttcattagaggaaatggcgtggcaggctttaaggcattttgatatactccactttttctctcttgccctgttttgttgaggttttcagggccataactgtacctgaggttaatcagtgagtgatctatctgaaaggaatttgttctctttgggcaccgtcctgtgtggtattatatttgtataactatttagcttaactcattcaaaaggctatttaagtcacttgtcctgttcattacttgaaaacaagttgtcttctctttattcttttagtcagttaccaaatatttcctaagtgtctcttgtgctagacattgaggggcactccttctccctttcacttgtctgtttttgttgagctacattttttccttaagtcagattgttcttttcctgttacttttgttttcacttgatttgtttatttatatttaaatatgtactttaacagtcttgaagcattggtctgaatgaggatggtgatcagattgggaaaatgccccttaattttggtttaaaaaaatttattttctttaaattatttgtttattgataggggccacccactccaggtgagtggtttctctgtgtgtatggcagaggaatgctctgtgtctggaaaaaaaagtcacttagcttgaaatattatgaaagctgaagagtacaaatgtcagagagaaaggggtattgggggggaagagaatgagaagacaagacacagtcagggccctgtcacccgtgtggaactgcaggtccctggagagatgatgcatttatccctttttagagatattgccattaaaagttgatcttgagcatgacacagaactgaaagctttgatgacaaagccagcatctcagtttagcaataaccaggttagggaaaaaaccccagaaactcaacagtgagattcagctcagcaatgtgggcggggaacccactgtcccgccttgggcagggagcagccccagccgcttcatctgcctgatgctgggttttatccgcttcacaattaaatttcctttttgttatgcttgcgcacatctatatttggctttgcttcttattttttaagaaaggggagaagtgtgggcaaggtaaaatacagcttgcaagctcccaaatggcaaatgcaccagttagagtctaagtggcctcccaaccttaaggtgaaattcatttattcagcaaatatgtaccaagcccatcagggaccactgctcgagataccagtgcaaatagaagaggccaagggcacattattaggtccggagccagtggcctgcacagccatctgtgaccacctacctctctgcttgcagggaacttcagcctggtggaggagacccataatagccaagtcaactgataatagaattagtagtagtgttgagggacataaagaaatcagggtaaggccatcacaattacatgggtggatgatcttttataaaacagcacagttttgttttcttctgccatggtatctcctaacattttccagtgtgtctacttgcagttaatatggaagttgcggctgacactaggttagtggttaaaagaaaacaagaaaaccaacctttagaaatctttagaaacatcattatcatagaaagctataaactcttatgtatagaagggtaagtggccattgatcttggagcagaatgaatggatatttcctggaaaaaaatatttccactcatcaaagatactcaagtctcttctcatctaatcaatattggaaactaggaatatccacgcctatggaatatcctcagagagaattaattattctgccctctaagaggtatagtagtttagacttagaagtaaaggcctgaacttgaggctgcaccattgaaggcaaaagtgccctttatctcccagctttgtcatttgccaaatgcaattgtgttaaattaagtgacctccaatagcagagctctatgttttctcccctgacccccaagtcaaaattgattatagtaatccatcaaaccaggcctggcaaatgatgttttgcaactaaaggataaatactgagggggagggacgaatgtgaacgcatatgcagagcaacacagtcatgagaccattctattacttcctaaatttcttaaagcttttctgtcttttctgagcttctcaagtgagcaggggcatgagttcctgtgttgtgcctggggacagggaaggctttgggacctactgtggtcttaagtctgagcagtgctaatagcctcggctcaccaagtgctgggcactgtgctagagggtgtacaaacctctcatctcatgaggcctcactgctacagctgacagagatgacatccagttgtttttagttgcacatggcagagctagaaaacaaaccagggtgtgtcagactccagagcgcatgccctctgtgatgccgctgtgttaccctagatcaaatcaaccaagccatccgttaaaaaaaaaaacctgatctttgtcaaatatgcaattgttatatttttgttagagtctgcctctccagtgaacgatattaatttccttcaagtggctactcacagatatcacaaaatcagaaagctgcctaccctgcagcctgtatctgcctccacgtccccacatcagtcctccttgctgtgcttcttgtctctttagtttttatcatcttctaacactgtgaactttagtaatttattctggattgtttgctacctgtctccccttggtaaaatgtaggctccgcagaggtagagcgttttgtctgttttcttcactggcatatctcaggtgcctaaaacaaccatgccagacatgtagtggtgccagtgacaacttgttgaatgaagaaatgggagaaaaaagcagaccccggagacttaggagggtctgtgtgagggagtctccaggcagtcttcctgggggtgtcctgaaggacctcctgatcgtgattttggtcagtgtggaggctgtggtttcttctgagctgtcagtatttggaggtgagttgtctgcaggtcacctcatcccacctttacacattagtaaaatggaattcgctgggtgattcttaggactgtgcggtcagtcgaattaccagacgtccctgcatgctctgtctaagggctggagtctgctttccttgcttctcttctagaaagaggtctgtccacaagggattagcctcgcgaagttcctactgttgttcattgacccagtgagtgttttacccactgtgggtttttcctacctaattgcccctctggttttcagtgttcaacatgctgcagttacgtgttctgctgtggttttacttagcttaatcctttattaattgcctcttgttcaaactccctaagagcagattatccttctctttcagcttctgctccattgctgttgaacttttttttggtcgtgacatcagaaaaataaccaagtgtgagtctgataatagcaagtaaggctattttatttctatccaatttaccccaaatttgagcagtattacaccttaaaataatagagctggctcttgcccagcatgtgaaaagtgtatgcttcacgatggacagatattttccagtatctacttaccataaatctcaagatttaccctaccccactccagccattacccccatgtcccatttgcctaacctaccctagggccatctcagtgccctgtaaagcaacctttgttgcagacccactgtgtgactggaatgtgatgcacacaagtgaccaaggcatggccctgttcgcaaggagcttccagaccaatagcagaaatggacacataagtaaacaactgcgctactgataggcttctgccaacaggagtggagcttgagggccaggaagccttcccagaggcactggagcttgttttaacgttacgtgcatgccaggtggggggcaggacatttctagcagaggagaaagcatgctgtgctctgagaactaaaagtcatagtcactccacttggtgacatgtataaggcacatggaatagggccagagctgggcagaccgtgtatgccacaatagttcgttgtaggttacaaagaaccagtgcagagtgggtgaggcataggctatttgattaataatttggctgcattgacaagatacggaaaaggcgaggttgggactttccgtgaattttctcctcaaggtgcttaatcagtgaggttgggatggccggagggggccctcatttgcttgcctggtgctcaagcctgaggtcctggcctttaatagtcagggaggtctgtgtggaggcagggtgtgagccccctccaaggaaagctgcagtgtgaaaagaggcccaggatgagcgttggggagtatccacatacaacttgatattcctaaagtctcagttctttatgggaaagcccatgcactcttccacacttggaattctttgcaaagtgagtggtatttgagcttctttagagtcttgctactcccaccagctgtactggcatcaccagggagcttgttagaaatgcagattctcgaggcgcggctcacaactacccaatcagactacattttaaccagatcccaggcaatccctgtgcacgtgaagtgctagaacactgctctgcggtaaaacgactttgctaaccatggaagagggtgatttttttcccttttcctttggtgttttttataggacctatttaccttttagaactttttcagaattatggactgcagaatatatacagtgtcaatgtcattagcaattcattagtgatatttggctagaatacatagttgtttccacacaaatgccatttcttacattgagatggcacatgtctggttaggacttgggctcatttgtaaggagccacgctgcaggtaggcatgctcccgggacattagttgctcaggtttcaaactgctgccccagcatagcagatggcacggtaacaaagtccctgtgcactctcacattgcctgcggtgatctatcacacattttgtcccctaataacctagctgggggggagctcatgtctctgtttgtgctaatgctcgctgtatccccaagtggcagtacttaatataattgtcattgctctttaatattatctcattccacgtcagctgcacaaaaatttgaggttaatcacaatgaatgttttctcaatccttgttattgagagctgtttaatagtttattttgtatgtgaagattcatatctagattgaggcttatacaacttcatttaaagacagctttttcggctgggcgcggtggctcatgcctgtaagcccaacactttgggaggccgaggcgggcggatcgtgaggtcaggagatcaagactatcctggccaatatggtgaaaccccgtctctactaaaaatacaaaaattagctgggcgtggtggcgggcacctgtagtcccagctactcggaggctgaggcaagagaatcccttgaacccaggaggcggaggttgcagtgagccgagatcgtgccactgcattccagcctgggcgacagagtgagactctgtctcaaaaaaacaaaacaaacaaacaaaaaaggaaagctttttcaggttggaaaaatatcaacagcagacatgaaaaagcatgaaaaatgacgctaagaatgtaagcaactggaaacaaaaattataatggtgcatagtgagctgaagatctatatttaaatgtgaactcccctttcagtttataagtgattactaacagcctcatcaggtttctggaattaaatgttttattatttcctcccaaagttagtcctcaaacattagtatttcttgtgttcttttgatttgaatatttgtttttaacacacaaggatatcaactctataagtcagttaatatgttcatgcttttagttaatcgaaagtggcttatgatttcagtttttggtatcaggtgatgttgcggaagtgaggttcactgtgaagcttcttctttttttttttttaatcattttgttgtttctttgagtgtatgtgagcttataactcaagacactatgtgaaatgaccctgtgtttcctacattatagaaaagaggaaaatgaagcaagttcaagaaaattagatttatgtggaaaataaattctgcatctagttattcattatcaggtatgagattacaggcatgagccactgtgcctggtgacctcatttgaactcgattacctctgtgaagaccctgtttccgaagaaggtcaacattctgaggtgccattgtcaggtatgaggtaaacacactgagaataccacattttggcaactcagacaagactattttccaaacatgtaaccctgggaagaaggtaacctatcatagtgtgtgttaagaagtcaagcaaccaagaaatgttaattgaaggcccgttttgtacaaggttgcatggaaaagacacactagcgtaagacatggacagtggccctgagtgacgtgcagccggtttaggcgaattaagatttacatacttgaaaagggacaaacaagtctggacgtggtgactcatacctgtaattccaacactgtgggaggtggaggcaggaggatcccttgaggccaggagtttgcaaccagcctgggcaacatgggaaaacccctgtctctacaaaaattaaaaaaaaattagccatgtgtggcagcatgcccatagtcccagctactcacaggggctgaggtgggagaattgcttgagcccaggagatccaggctgcagagattgtgccactgcagcctgggtggcagagcgagaccctatctcaaaaaaaaaaaaaaaaaaaaaaagaacagaaaaggaacaaacaacagacacaagattccatggaaaagggagtggtctaagtattcagactgtaggaattcagagagtggagaggctggttattatgggggtgcttcatcctggggagttgagggaaaggaggtgctggctgcctggagcctggaagaatcaaagatttccaaggccatggggggaaagcatgaaggatgagtgaatagacaccagggctgagcaccctgaaaactgtgaagatactagattgacctgtttggaaaaccaaacagatgtggctgttattgacaagtggttttgtttttgttttgagacagagtctcacttggtcgcccaggctggagtgctgtggcttgatcttggctccctgcaacctccgcctccaaggttcaagcagttctcctaccccagcctcccaagtagctgggattacaggcatgagccaccatgcccggctaattttttgtatttttagtagagatggggcttcaccatgttggccaggctggtctcgaactcctgagctcagatgatccacttgccttggcctcccaaggtgctgggatcacaggcatgagccactgtgcctggccaacaagtggtttaaattggattctccatttcccacctaatagaaagtcggaagcatagggcaaaagtaaaggaaggaccctgtgttctgctggttaaatataacagaggtctgactccatggctattataggagaggtgcattttgttctatgtaaattatcttgatgtgtcccctgtgcctttaccccatgattatttagcacttttttctccacggtcacagggacagggagaaacatacacccataaaacagtgtcatctagaggcaaaaacttgtaatgctcaagcatgtgctctgacgaggtggggcagggtgtgtaggaacaacactctactaattattacagagcttgctctgcactctctgtagaagtccttcaatatccagtctaacacacacagtaacttaagagaggattttaaaaaatcaaaatgccctcagatttgtattggatttaaccaggctgagatccctgagatccaaatataataatgtgtcctttttggatgaatcagacacaagcaaaaatctccagtgtgtgtccagctttagaggtgtagtaatggattccacagttcacgctggtgggccagccaagacttttaatgctgatgtgggcttcattctttctataaactccctttcttcttgatagtgcatgggcccaggggttccaaacatgggtacctgccgtaattgatctgtgtaaccggagaaaatacatatcctatggcacccttgtgtcgggatatagggggcatcaccgtaatgtggctctttttctgttgattatagttttttctttctgtgatcacacaattgttttatcctcgcttaaaaaatttcaagaagtgcagcactcagaataacagaaaagtcaggtgtctggtggtttgtttgcacatttaatagacttgaagataaactctctaaacatttattttgcaagttgtttttctgagagttgaggggaaacttttgccctttggtctccctgaggaattctaggatttcacaggtaggcgtgtgttttggactgcaggctgaacgtggttggcagggtggcatgaggagggcacatattttaagcgttcttagggcagatccacgatcctttacctgccatttctaagtccaaaaagccctgaaaaccaaagacatctttacaggtttgtaggaaattgatttgagagcaaaacctgatgtgaacagatttgagagtattctaggcatcttgtataacacttcattcaatgctttgtgcctcttgctgcacagatattaacattcacttatgggccctgccccatcccctactggggatgctatgcaataatcagaataatcaaactaataataataataataattggaataatcactgagtcattgtattagtccgttttcacgctgctggtaaagacatacccaagactgggtcatttataaagaaaaagaggtttaatgtactcagttccacatggccggggaggcctcacaatcatggtagaaggcaaaaggcacatcttacatggcggcagacaagagagaaatgaaagccaagggaaaggggaaaccctgtataaaatcatcagatctcttgagacttattcactatcacaagaatggggaaaactgtccccatgattcaattatctcccactgggtccctcccacaacatgtgggaattataggagctacaatttaagatgacgttgggtgggaacacagccaaaccatatcagttatctttctaaagtgagacaaaaagtcagaattctgtaacacattttttcccaagcgtttccaaaaaaggttggctttaatggagtattagtttgctaggcctgccatggcaaagcactatgaactaggtggctaacaacagaaatttattttctatcagtgttggagtccagaagtctgaaattaagagtcagcaggattctgctgtctctgagccctatgggaatatcctttctggctcttctagtttgtgatgtttgccagcagcgttctctgttccttggcctgtaaatgacaatcttctcgttgtatcttcacatcgtctttcctctgtgcctgtgcctgtttgtttctgtgtctacctttcccctgttcataagaacaccagtcatattggatcagggctcaacctaatgacctcatttctttccttttctttctttctttctttctttctttctttctttctttctttctttctttctttcttttcttttcttttcttttccttctttttttctttctttctctctctctttctttcttctttttctctctctttctttctttccttccttccccccttcctgcctccctccctcccttccttccttctttcttttaaaaatatttttcttttttttcccttccttcctccctcccttccccccttctccttccccttcctccctttcccccttcctccctccttctctccctccctccctccttccctccctcagggtcttgttctgtcatctaggctggagtacagtggcatgatcatggctcactgcagcctcagcctccctggcctaagcaatcctctcacctcagcctcttgagtagctgggaccatgggtgtttgccaccatgcctggctaagtttaaaaaaaaaaatcgtagagatagggtctcactatgttgcccaggctggctttgaactcctgagctcaagggatcctcctatctcagcctcccaaaggggcgagattacaggcatgagccactgtgcctggtgacctcatttgaacttgattacctctgtgaaaaccctgtttccagagaaggtcacattctgaaatactgggggaacatagttccccatcttataagatagagaatggatcaagacgagcagctccattctttgtttgtgtttaggccagtgccaagttcaagatcttgcctcagggctttcctggtacccctgggaatgtgtatcagcagcagctgtgtcactgaatgggtgtcacctggggggctgcctgttcagacattagaagctgccacatcccctgttaactccatgtgagggaggaatcccttccctccgacaatttcgcctgtgagaatcaagtcagattttgcagtgagaactgagctgagtgtagaataagttcccgaggtacttctggcaccgttgttactcccccaccgagaagcccagaatgttcccaggtgtgttcaaagattgtacgggaagggcttaggacggtgcttggctcatataaacactcagtggcaaagaggttgatgcttaagtacacaggaagtgtttaccagtacacataattgtataccagtgagctccaccattcaatttactgtctgtccggtacattgaccctgtgaggcccactctcggtgtggcactgctaacaggttttattgttgcttactcacttgaaaagtgtctcccttggctagacctttgtcctgagcactggacacacataggtgctcagcagcgtccctctctgcaatgcaaaagggataccgtgtgcctctgcatgtcagctctagtcctggcatcccaggagcatacggtgacagtggaagtgaagtgcaagccgagtcctgggaaccaatgtctgccagaattaattaaaagtaagcatctttttttccctggttagttaatccaggatgaattccctgagtagttcctgccgttagaacttgctctcttttttagttagacacagctcggtgttgcctccactttgacatcacgttcatagttcctgtgcttggccagaactgttttcagttgcaaggacatgggtgagactggtcaaggaattgactttcagggttccaagggaataattagttcagaagtctgtccccatacttgttttccagtacaatctgtgtctctgtgggtgttttcttttaaggctgtgtgctttataaactggagatagaaggagccagtttattataaaaaggataaaatataattaaacaattaaaagtatgtctttatagccgggtgtggtggctcacatctgtagtcccagctacttgggaggctgaggcaggagaatcgcttgaacctgggaggcggaggctgcagtgaactgagattgtgccactgcactccagcctgggcgagagagtgagactccatctcaaaaataaataaaaattaaaataaaaataaacataggtctttggccaagtgtagtggctcccgcctgtaatcccagcagtttgggaggcagaggcaggaagatcgcctgaagctaggagtttgagaccaacctgggcaacatagtaacctcgtctctacaaaaaatttttaaaaattagccaggcatggtggtgtgtgtctgtagtcccagctactcaggaggctgaggtgggaggatcgcttgagcccaggaggtcgaggctgcagtaagccatgatcttgccactgcactccagcctgggtgacagagcgagaccctgtctcaaaaaaaaaagaaaaaaaaatttatgaagtactggttgggttaacgtttcttcttctaaccatgagggaagtaggtgggctgttctggtgactcagtgtcctcccagactcactcatgagaggaagtattcacggactgtggtgatcttgtcttggaatttttttctttgcctcctggcctcacagccgttccttttcttttacacatccatgaaagggagactctaagatcttccttgccaaggttgttgtagggatgagcgatgatgtctctgaggcaccaggcacggtgctggcacccagaagctgcttaatgatcctggaagttatgaccattgctcatagtttttcctacgtttcagatcatccttaaataattgtcattggctgggcgctgcggctcacgcctgtaatcccagcactttgggaggccaaggtggttggatcacctgaggtagggagttcaagactagcccgaccaacatggagaaaccccatctctactaaaaatacaatattagcccggcatggtggcgcatgactgtaatcccagctactcgggaggctgaggcaggagaatagcttgaacctgggaggcagaggctgcggtgagccaagatcatgccattgcactccaacctggacaccaatagcgaaactccatctcaaataataataataataataataataacaacaataattgtcatttatcagcttcttcgagctcttaatatatatatcgccacctttcacaaaggcaaaatctgcattagaaacactgttgtctgattttggttcctctggaggaggggtagacagtctttttgtgggcagggtctgtgtctgtttacctctattccccgccccccactttggtgcccaccacagtcccttgtgtatggtggatgctccttgactatctgaggaataaaatcaattgtgaaacagtttccaaaaagggaacagtttttgtttccccgtttccttatagccttgtgagttgctatctctcttggctctattattaataacataaaagaaagagctgttttcttaacctctggtagttgcacatatatggggaaaaggcataagaaaatatgctggcaataaagacaagtcacagattgtcattttctttggtgactgaagggatatttcagtaatttataggtgaaatcttcctttttgtgacttccactgaacaacatttttactaccaaaagataagggaacaaaattttttaacaaactatttaagcttaaatatttaaacatttttattagtcaccacatattaataaaatatttttattagcacatattttattagtcaacacatgtgtacacagctctgatgatctctatgtagatgcctatataaatagctatatagatatcatcagagctgtgtatatatgtgttagagatagatgcacatacagttgccccctgtctcccaggggtctctgtgacccaaggttgggaccctcaagtgactagttatggatggcaaggggggctgcaaggccagagttggtcctggctagagatttcaagactcgagtggctgggaaggttttagaatgcaggtaaaccactagttgctccaaacaacaaaaccatcataatggaagcatccaaaagtgtgttcttcggcagcttcagagactatgcctaagcaataaagttttaatgtcttttttagctgcttaggtgaagaatgcatttgactgtaatctaacccattaatctcttatttttgctggaaaattgtacatatttaagagtagtggctcattgccagtattggtgatgagtgatatattttaaactatgcttcatacctttcagtaaatcttgggctgaaagatatgtacgttttgttttcaaaatttttcagtagtcatctatttaggtcaattttctgggcaaacaaaatatttgaagccctttagggtttgttattgagatgtaggctggccatgaaattacagggttcagtacctcattgaagtgtatatgtaactgttattagttttttgataacttttttatactcataaaagtagtacttgcttacagtagaaacttaataaaaaccataaatggaaaaataaaccattcgtaaacatcatatagagagaatgactattaacattttagcctaacatgattttaggggtttataatattctagtatatgattgtaccataatttatttaattgcttcccaattattggactggaagtttgcttctaattttttcttattatatatgatgctgtaatgagtaccttttaccagtaaatatttacctgcctctctgattacttctttgggattaatccttagaaataaatttgatgaatcaaagggcatcaaccctttgaatgcttctgatacttctgccatgttgtttcccagaaaagatataataattattccttccagtagtagagtattaaatgtctgcctctctttagaaagtattaccttttttcaatctttgacaatttgttagataaaaacttcagtttcaatattattgcatgtattcatggatatttttcttctcacacattctagattttttctatattgtttataaatgttttataagtgttattactttattgaggatagaaattattatgtaacacttgatggtaacagtaaaagtggaaaagaatgaggaaaccttcaacaaaacaagttgtcattaacaaaacgggttttgcaatgcaactttctgtgggttagctaaatctttagtgtgtcaggtagtcgaaagaaatttgctgtatagtgctgtgaaatatgctgcatccatgagccctctgctctttgcccatagggagcaaagacacaatctttttgcaagctgtcccagtgccatattgaccatcttccttttacagcaaaaagttattgcttcctttggttaaggttgggacacccctctggaggcacacttgaaaaatgaagacctttctcgttgttcttctgttatccaagtatcttggaagaacacctctatagcaggtagacaaggcagggtgtcattgcaatctggctgcagactgaatgtaatcccccttgacattttgccccttggaggcaactcctgccctcccctctccccttacgaccctgcccccttaaaatatgtggagctcagcaaagactatttattctgataaaaatgagcaaataataggtgtgaaagaacatggaacacttcagtgaatcaaatggagaggattaagcattaccccaataatgattggtcaggacgactgtccctgtggagtgtgtcccagaagggttgagcaatggagcaaacccagaaaatctcattctcaactctccctgacagatgacctcgtctgcgctgtcttttgcttcatggtgatgaaggtggaacaagacccttgaataagatttccatctctgaattctttaaacccatttgagatcagtgcaggcctgcagtctctctattagaactggagcagaggcccagaagagagaactgaattttcagcactggattctatgttgagaatgaaagagacaataattgaaaagcttttctcttggaaattttgcaaaatccgagtggatttttgaccaggatttcttggtgacctctcctgagagagcaggtgcctgaggatttcctgctgagtatcttggcatctgtcagactccttatgacttcattttagttcagggagtctgtttcctagccattgatttcatgcacaattcctggcatgtctcatatctctaaggtgatgtcacccttgtatttttttttcagatgtaatcttttatgtgacagtgaggtgtcttacttgtgagtgaacagctagaacctcccaagtggtttttcttttggattttgtttactcagtgaaaaatactgaggaacctgagatccttcagggtgcattttggtgtctgcccaaccttgacgtggatttggaggccaggctcaatgctcgaacttcttgttggagtggcactaaatcattaggatccctgaggacagacagttcaggccatcattatttggtaggcccttgcacacttacacacaaatgcatcattatgaacatggagcagaagattctagggccccgtgtgtaatggcacaatttgtcaagaggcctgagacctggagttggcatggattccctctcctcctgacccacctacctgctacattcagttggccaccctgttcttttgagtccacctttggatgagtagtcagtcctttctgatttttgccacctctgcattcagagctttcttattctttggcgcggaggccttccgttgggtcccactgcctgctgtcttatctccttctaatgaatatgatcatgatttttctgtatttagacaactccacgatgaggaggatgatggcggcagctaacatttatgtatgtatgtatgtatttagagacagattctctgtcacccaggtgcagtggtgcaatcttggctcactgcaacctccccctcctggattcaagtgattctcatgcctcagctccccgagtagctgggactacagatgcacaccaccacacccagctaatttttgtatttttagtagagacgagattttaccatgttgtccaggctggtccggaattcctgacctcaagtgatctgcccaccccggccttccaaagtgctgagattacaggcgcctgcctccacacccagccagcagctaacatttattaagtgctcactatactcctgccaagcactattataatttgtcttctaacaggctttttataagggaagtgctactattatacccattacatagatggtaaaactgaggcacagagaggctatgtaagtttcccaaagtcatgtactaattgatgaagacccagggtttgagctctgcaggaatggccgactccttgtggtttgagcctgggctccctctccatctgtcttttctccctgagccctcctgactgcagccatgccagactttttaatgttctgaaccccagctccagcctatcactggagctctgcctgtgatctttccacctcatgcctcccggttctatgtgtgccttcagactccatctggcagtggtatctggatggaccagtgcatagaaatcacatgagacactcaataaatgtagactcctagtgattctgactagcaggtctggggtggggccaggtacccagatttgcacgggaagtcagggaccactgctgctgactgcttttttcctgggtgcttggcacactctgtcacaatcatgttttcatttctctatgttccatttcaactggatagggacagtgtcttttgtttctggaacctgtctcttttcttggcatatagtaggcactcaggaaatagaaggttgcttgaatcctagtaccagtttactatctccttggaaagactgaaaggtagaatgtgatgtctaagcagcttcactaagcagagaaaacaaaaagtttgcaaaatagaatttgccttttaatctacatgttcttgcgtagcattgagcttcctagagagtcatattcatgctagccctgagttgtatcagcagcagccactagaacggtaacttgatgccaagagtgaattctgatgagcttcattgtgagtaagagtcccagtttgatcatctctacccagatcccgtgggacctccacactgtatgaataatgaggaggcgtggaatacgtagcatgctgcagttggccagcacccagtgtgtactgtgaggtaatcagtgtcaaatcagtcattgtagcaggagttgggagtcaaaaggagcaacagagaacctcacacgtctcctaagagaggaagcaaagaacagttaccttggctgtcatttatggggcatttgtattgtatgtttggaatggtgctgggtactagtattaatacatgattttctctggtctttgcaaaaactgcctgagttaggaattgtcattcccatttcattcatgagcaggctgaagttaagagtggttaagtaccagctgaaagggaggaggagcctgagagcaatctgggcacccgttctccccctcttcttatttatgaatgaatgaatgagacagggtctcactctgtccgggtctcactctgtcgcccatcctggagtgcagtggcacaatctcggttcgctgcagcctccacctcccaggctcaagcagtcctcccacctcaacctctgtggtggctgtgactacaggtgcatgccaccacacgcagctacattttttttgtatttttttgtagagatggggtttcgccatgttgcccaggctggtcttgaacccccgggctcaagcgatctgcctgcctcagcctcccaaatggttgggactacaggcgtgagccactgcgcctaaccctctcctcccctcgagcttacatcctactgtcctgtagccagctccaagatgttggcctttggttctctcttcaggctgaactctctttcagggagtttcctaatcgatcttccatagagttgatcataccttagtacctacctggatgagcactcaagatgttacatattcccacctgacttctttattactgctggaagatatggtgtcccacacctaagtatcccacccacagtccccagctgcatgtgtcgattattgtgagctattcaagggatacagactgaggtaaatgaaccaccagtggaagaatgtggatgttctattacaggaaatgcttagctctttattgcagttatataatagccggcaatcatgatagctgaggggcataaaaatgagagcaacagagtttatggtattctttataactgtggattctgtatgtgcgtgtgtgtgcacgtgtgttctgcatgcatctccacggcacattatctggaggtaacatgatcatcaggccttgagctcttttataagcaatagattgtggctggaaattgaaaatttagtttctgtagctagaaaatactcttttcaaatgccatctagaacagtagttctctgagtgtggttcctggatcaggagccttggtatcactgggaatgtgttaggaatgcagattcttgggttctaccccggattgaattcagatttgggagcggggcccagttatctgtgttttaatcaccccctcccccaggtgaatctgatatgctaaagcctgagcctcactcccctggaaagtgacgcctgattcatctgccagcccatgggcacccattaggaaggtgcttatgggagctttgacctgggctaggtgccggctcttgatccatctttttctaaggctgagggtgtccatagaaggagaagtaggtgcatccgcttagatgttatttaaccaaataaaggtttacagcttacagaaaagaggcaagattaactaataccttccaaaccataatgtaaaaaaaaaataaaaaatatttactcataatggagtataactgaacaaatcatgttgctaatttttttaggatatgttttgtagcttccattcagatacatcttatgggtaataaatacacacgtgaacacacatatgtgtactaacaatatttttcagacttttgattttttagatattgagtatagccttgttactaccaaacttttatcatacttccttgtgaaaggatttcatggcatatttattatttgaaatatcaaatagaaatcagtacagtctcagcattttaagatacttgatgtaatctttggaaatatcttagacattgcaaaataagggttaatagtcatagtatagccactaacgggcagttctgaaattacataaagttaatctgatgaactgatagcaatcagtttttggctatacataactagataagtgagaatttagagattgaatacatgagagccctttttatgattttcaggatctcaagtatgaagcaaaataaattcttctataccctaaattcttgcaaagtgatattttgattagatttgagctaccccagggctagcaatacttgaaagtgtgactagacttaacctcttagtagatagtccgcagtaatcctttgaaatatacatcttgctaaaagttcctttcccaaggaaataatgattaaagataatgtgatgtgtacaaggaattctgggacttgtagtcgagaaacctgaactttaatctagactactcaaatttataactttaggcaaatctctcttgactttctaggctttagttttctagggttttgttttgatttgtttttttatgtttttgtttttgtcttttttttggggggagggtgttgagacagagtcttgctctgtagcccaggctggagtgcagtagtgtgatcttggctcaccgcaacctctgtctctcaggttcaagcgattcttctgcctcagcctcctgagtagctgggattacaggcacctgccaccatgcccagctgatttttgtatttttagtagagacagggtttcaccaggttggccaggctggtcttgaactcctgacctcaggtgatccacctgcctctgcctctgaaagtgctgggattacaggtgtgagccacctcgcccagccttgatttggtttttaatctgtaaaatggtaggtgttgggtcacatgaacaatggctcttttacctccactaattacctagacgctagaaataagaatatggataagacctaaaccaaattttctagctaaattttgtaaagtctgaacaaaatctgtgtgcgttttaatctttcttgtaatcttttcagactctgtctttaaaattatatatatttttagcttctaagtaaacattattggcactggttttgataggaactttactccaagtgtattgacttagtagatatgttaaaaaggttattgcttagtttgtggaaataatacaagctgagactttaactgatatttgtattttcatttaggttccactgttttctcttttgaatgaaaagtataatcctattaaatctaaaatattttcttacagtgatccgtatgtgaaactttcattgtacgtagcggatgagaatagagaacttgctttggtccagacaaaaacaattaaaaaggtaggtgtcgatctttaaccaaatgtcatttaagtcataatttaatccaattatgcacagtcatgtgctgcttaacacctttttggtcaaggatggactacttacacagtgatagtcccgtgagattataatggagctgccatatacaagtgcatcactttttctcttttttttttttttttttttttttgagatggagtctcactctgtcgcccaggctggagtgcaatggcatgttctcagctcactgcaccctccgcctcctgggttcaagtgattctcctgcctcagcctcctgaatagcagggattacaggcacctgtcaccatgcctggctatttttttttttttttttttttttgtatttttagtagagacagggtttcaccatgttggccagactggccttgaactcctgacctcaggtgatccacctgtcgtggactcccaaagtgctgggattacaggtgtgagccaccgtgcccagcccactttttgtcttatatactgtattttcattttaagtgtctttcagtattaaatctagaagttttccaagacttttcagtactaacccaagatagtgattcaggtttttacttaaatgcctacaaaaacagtatcctgaaaatgtcataagttgtaacattttttcttgcacagaatacagcaaaaacaaggatttgtttttgtctttgtatgtttcacaaagaaacttaaagtaatttaaaatacatttaatgaaatggagctgtttgtggaattggtaggcacaccaggaatagtttaacttgaaacaactatttctaaaggaagcaaaatacttggttagctacatggaaatagagaaaatatattaataataaagctatacatgtatgtatatatcttattttcctaatttttatgtacatgatttcattaaaaatttgtttccataagtatgtcttttagttatttatttatttagtttgagatggagtgtcactctgtccacccaagctggagtgcagtggcataatctcagctcaccgcaacctttgcctcctgggttcaagtgattctcctgcctcagcttcctgagtagctgagattacaagtgtgcaccactatgcccagctaattattgtatttttagtagacgtgggattttgccatgttgaccaggctggtctggaactgctgacctcaggtgatccacccgccttagcctcccaaagtgctgggaatacagatgtgagccactgtgcctagccaataagtatgtcttaatttgcctatctccatgtatttatagacatatgtaatatatatatatgtaaatattttttaccctatgtttggaggctttattgaagatgcatgttctctattaaaaatacttggctgcatgtggtggctcatggctgtaattctagcactttggaggccgaggctggcagatcaattgagcccgggagattgaggttgcagtgagccataatgatgccactgcactccagcctgggtgacagaatgagaacctgtctcaaaaaaaacccaaaaaacaaaacaaacccctttcatctgtgctttagtatcatttatgggttactatgatttttttccttacctcctttagaggcgggtgcttagatagtctaacactttgctgaacattttctggacagcatgagtgctttaaaaaattgtaactgtcttgctgccatgcaggcacccaggatgcagccaggtccttttgtgtaaggaaccgtaactgcagcgtgtcctccacttggcattgggactggcattaaaaatctgttttgcaaacaggagccagtcttttgattagcagggaggatgcctgcgagggacggaggccattgttccctgtgttaggcgttgttgctggttcagtttctaggcgagtgggggctgtctagaaggctcaccaggaaggcagctgggaaacttggttgcctgctggatgtggagccaggaccaaagccggcgactggggctattgcaatggatttccttccaaagggaggtcctccttctccctccctttccacggtcgagggagtagctctgtagctgggtttgccctccttctcctgctgcccgcctcctggttcgtatgcctctgctgcgttcgggtgcgagaactgccgtcatcctcctctccttgccgtgttgtgactggttcttcgttcgttttgtgctctcctgtcttgttgctttcctcgcctgtcatttcccatgtgcatttccgtgaagctgccctccgggactgcagccagaggcaggccaggcctgctgctccactcccctcccctcgttcattaccatccttggcttcattcacatgggagaaaagtatgaaccccattatttaggattgaattcactgtggagttgtgggtggggaaagtgctgaatttttgaaaacgccggttcagtgttgtgtgagctctgtgtttcctatttttatgttgcactctgttgatttttttcatctccctgaactgatctattaaaggaaatagattgataaatatcattttgactaaaaatatctatcgctgttggtgaagtgatggtttttttttacatacaatttttaagagctgtctttaagaggcttatgcatgtgcagatgcatgaacacacatgtacagtcttccttcctagaacatgcttcctcttagttttgggggatatctggcagtcctttcttccatgctgaggacaaaggtatccttgccatctccttgtgagatgtacatttaagtagactgatagaaagatgaacagatggatgaatggagaggaagactgaaggataagtagacaagtattttttaacctggttatttttggagaaaaaaataattcacttttggcttacatttggtctttttttttcttgttataaaatctgatcctcagtatagctctctataaaatgttaagatttcaatatttatataaacaatgaacacattcaactttcccccacctgcttcgttactctgcaaaacagatttgtagcagggagagggaagtcaacaaagttcatttccttcttggtagaataatcatatcaatgctaatttcttgaagaaattttttatattttcacgatgactctttccaggcctttgatgtttttccttctggtgatagaagcagtttaaggtttcatacctatgaagcatctgtttcataaatacattccctccccctccagtttggtttgtacgctagtctcaaataatcgactaaatgcttctcttagctttttttaatcaaaaaaatgtttaagcaaatatgtagactgtattgtactagtaactgctaatgtttgaaagactaaaagatactacaagataatttctcttccagacactgaacccaaaatggaatgaagaattttatttcagggtaagtttttcattgtttggtaataattgttattgatacgtctaggtcgattatcacagtcaattcatcttgaggaaaagctcttaaatttttaatgagaaattccttttaggatgaaaaataggtagcctcctaatgtgtcccaaattttgaaagactagaagtagtggtcacagaatccggacttgtttcattggggagtgttttggagaagtcaaaagaaaattatccaaacaccatgtttcatcttttgaattcaaacctttctttaagaaataagataaaatatcatttatgagaatggtttaattctatgagacgggttatgaaatattttagagagagtaaaacagtagaggcaacatgattaaaaagaaacataaaaattaccagttatattctagttagggaggaaaattttggtaactgaaacacttgagtgcatatatatgtgtataatataaaattacttctggaatctaaatacaacagaattaggtaagatttcctcaaccttttatatttaatatttagaatagctatatgtcgaaatgactgaaatatgtgaattagcagagatttctgcttattgagcatttgtggttgttgctgtgttttactactgacattttggaactattagactgcttagctatttaattgaaagaaaggactttctcttcaaaacgaaggtatcttaattgtatagctgtgatattaaaaactgcttacctccagaaataatccaggtcttctgattagtgcagatttccaaaggccagtattgccatgaggcccattataattggtcctgatttcttcctctcaatcgcaatagtattttttgtgctccaaacttgggctactacatacagcatctgctttccattatgctcagagctgaaatatggcactgatactttcatacttggtgaaatcctatgtacagcctccaccagatgtatttgaaattaccctgtggaggactgaaaagctaataggagctgatagatgctgttggcctttagttaactctgaaatatagctttccacttgtgaacctccaaagtgtttagactcctttcagtggaacactggcacagttacataaatgttagtacatcccatacttttttcagctaatcttggcagtaggcacatttaagttctatttttgttagtttttctgaaggttttttttgtttgtttgttttgttttgttttgttttttgagatggagtctcactctgtcaccaggctggagtgcagtggcacaatcttagctcactgcaacctctgcctcccaggttcaagtgattctcctgcctcaacctcctgagtagctgggactataggcccgtaccaccacgcctggctaatttttgtatttttagtagagatgaggtttcaccatgttggccaggctggtctcactctcctgacctcgtgatctgcccgccttggcctcccaaagttctgggattacaggttcttaaggtctttatatttattcattttacaaatctttattgagtgcctattatgtgccagctcctgcctgtagcctgtggttgcattggtaagcagtgtgacccttcatagagcttctaaacagatagcaaaccccatctgcttgttctgtcgctaggctgcaggcagaccacggaccagaagcacaagctgagctctctgtgcttgtatggtcaagtgttatttcatgcattccccaccatgaagcagccagggcctaggtcacctctctgctttaccatttagagcctttgtgaccctggaaaggccacctgaggactctcaatctccctgggatccttatctctcacataggagagagaatccttacctgcaagggttgtttcaaggatttgcatgcgatgatgtaaatgagaacatgtagctctatgtcacacatgtggttggtgcttagtaaatgatacctgagtttggaagatgatatgggccattttggtgaggttttggtaaggaaaaggaagcaaaaagatatggaaagcccagtagctctgtcattgcctcacagttccaggtctctctcatggttcacagtctaggctctggagacaggcagcatagacctagtgcaggtcctggttgccctacacattagctgtgggctcttgggcaagttacttcactgaacctcagggtctcggctcctcatttataaaattgcgtgatagttatacatcataggattgctgtgaagattaaaggagatcatgggttgttgatatttaataacaagacagtgcctaaaaagtaagtgcacaggctgggcacagtggctcatgcctgtaatcccagcactttgagaggccaaggcatgcagatagcttgagcccaggagttcaaaaccagcctggggaacatggtgaaacctcatctctacaaaaaaatacaaaaattagccaggcatggtagtccaagctactcaggagagtgaggcaggaggatcaattgagcctgggaggttgaggctgcagtgagccatgatcatgccactgcagtccagcctgggcaacagaacaagaccgtctgtctctgtctgtctgtctgtgtgtttgtgtgtatgtgtgtgtgtgtgtctctctctacacacacacacacacagatacattcttaagctattacaatcttcttcattatttttatcattactattactgctatcaggactaagaaatatcctcaggcatagacattttttgatctacagtcatgagaatgccttgtacagaggttaggaacccgtcaaagctatttacaactatcctttcttattttagaaaaacagctaagagccttctcttcttttgctatgcctaaatttggggcagaataatatagaaatcagtaataggaaatttgatttagtacacatagaattcccagaacagcaggataattgttcatattatacaattgagttgggcgcattgtaaagcagtatgttattctttctgttccttacgtcgctgttcaaatgattcctgctcgtttaaaaaatactatttatgttccttataggtaaacccatctaatcacagactcctatttgaagtatttgacgaaaatagactggtaagtggatgcctgtatttgaattttgcttcatttttttattaactggattttcagagcagcgtctttaaaactctgtgtttatgttgtacttaggacagtatatgtgcccaaaaagaagactgtttttgtcccactacgagtttgatgttcaaaatcctaacaaatagttttatgttgctaggataaaaaatgtatttgtatgtgtgtgtatttttattgcagttaatgttaacgaaagccactggtgatagtaccagcccatatgctcatgctctaatgttgggaatacagaacggtaggcagatctctaaagaggccatcaggaatgtaaacaaactttgctcggtttttaaatgaaagccagaccatagtactgggatgcattcagtagcaaatctatggtaattctctcagggaaaataacaatctaattaacaacgtatagcaaaaagtgaatctacatttagcaggtaaagtcaagccgtattttaaaagtggttgccttcttaagagagaaccttagaaagtacctttaaagaaacaaagatatgcctgaggcatataacagatacaaactaacattttatatatagattgatgtatatataatatgtttatgaagatcgacacatacataactgaaataattatgatttcattttattgtttttaattttttttagagagagggtctccctctgtcacccaggttggagtgcagtggtgcagtcgtagctcactgtaacctcaaacccttgggctcaagcaggactccaggatagctaggactacaggcatgagccaccatgcctggccagatttcattttagaaatggaatttttgaagcacattttgctttcttaactatctaaaacgtgtacatcaagtagctgtgaaccaggtgttccaactatgaaaatgaacactatcatgttaagtccttaaggtaccttcagaagtgacactataattcagtgcagtcattctcaaatttaccctctctgaaacttgtatggtatgttgactggttaaaaggtgttcttaagaatcctttctgcagtattcaattgaaactccagatttttaatagctggacgttaatagaatatttgaattggaggagccttatacaataactcatttaactcctgttgttgtcgatgagaagaaccaggtctagagcctttacataaacacatcagtcagtggaggtgccagggtctgacctgctggcctcctaagtcccagcccagtgatagtttgggaatgtattgaatctcatatgattagtattattctccaaaagagaaaactaacagattttggcctaccatcctagtatcttttccattaaagtatgggatgttgggtgatgaacagtcgtacagtgtaactaaaccacttttgttgtatgcatcaaagtactttcttgtgaaattggatgagagattctgctgagggtgcagttcttgtctctccatctctcatccagtgaggaccaagtgagttaagcagtattgagtagtataacagtacgttcctggagacatgggtgtgtctgtagactaatccttattctccaattattgagtataatatctcttgtttaacatgaggaaagggtcaaatttgaggaaaaatggcctcttgtttgatgtgttttagttcattattctcttctattaagagaaattcactgttaaaaaattgtttcccatttccgtatctgaaataatgactgtagttgaggtgatcttgccctgggtctgaaatcatacttccaaaccaaaaaggactttgaatacaaaacttttaagaaatcttgtatgaatacaagctatatctgaaaaattgtgttttataatattgatgcctagttttgccccaggccatctgcagtgtggttactatgcaaagaatgctggtgttgctgtttttttttttttctttgttggctattaacccagcggagacaatatgtggctatggtagtacttggaagttctagcattacacagactagcttccatttctctcatagaggtcatttttggcatttaaaacacatacttttagaaaacagatttggatgtatgtaaacacagggttaatccaccacactctggatgctagagctgttgacaaagtcatgctttgcagattttaaaataaactttttgttactcttacagcttggtattttcccctcctattttttttacctcctctaaataaacctctttgttaaataattgatgtttctggatcatagaaaatagtaagtttaaaatacagaatatttccaagctaactacaaatctgatgacagttttttgagtgtgcacttttccttttatttcttaggtcctttttggtcctttgcaaacatagtaagattccatatttgtgtcccaactgtggtaatattgctgacttcttactggaaaacagtcagctctaggtagcatttcttctgtgtggtatttaagttaaattattaccaaaaaaaaaaaaaaaagcccacatgcactcccttcttcaattttccttttgttttttgttgtttgtttgttttttggttgatgttttctttcctacctgacatatggaagacaatgttttctccagctgggttcattttctctttgaaaaggagacactttggtgtctgccagtcatatgtgagctacacacacgtatacaccttttaaatgaaaaatgctgtgatagcaggagggctctgcttggctaactggttgtgtagcaagtcgggccccctcccctccacttagctattttgttacttgtagatcctgctctaattatttagcattaaacggacactaactctgtagggtgtgtaatcgtatttatagtactgttttattagtttgcattccatcctggtagtgtagtgatgtcataaataacagaaacatggtatccgatgcttgggaaggggtttacccggtggccaagccatattttacttgtcattattccgtgtggcggaaggtgggaaaataccgtgtgtgctgttaaacatgccaggtccctgcactggttagacagagtctcagtgctgtgctccgttgggaaagaagtgccctgcgaatgtgatgtggtttagatttatagcagcgtggcttgcagtgtgtttgctgccttagtcagctgtgagagcgccctgctggggccactcctttctgatggaaaagcagcagctgggaaggtgctgtttcaggctcttgctgtttaaaaaaaaaaaaaaagagcgagtaggggaaaactcctctaagtccagaagctggcattggagggggagagcgcggtcatgtggttctggccaccctaccctctgtcacagtgtggatgagagctttttgctcttatccaatcatgcctggaatgccgcttgccacttgggttatttctgctatctgtcgctcccggtgccgcagtgctaacagtttggcagatgggacactttttcttggaatttgtgtctttggtttgtgacttctggcagtgtcgggcctgttgttgccgcttgccctagccctcctggcccccctggtcaccatggcccatcggcttcggtttcattttggctctggtcgcagcaacacagcccccgaatcagacatcctagaccaggagagagaagacgacttcttcatggcattccacaccctaccgcggagaagcagcccgcaccccttcgcccagaacggaggggaggacggcggcggaggcctgcagggaggcgtgggtgcgcttaagcggagctcgtccatgttcatcccgcagctcttgaccagcatcgacgcccgccccacgtgcagctcctccgtgcagatctccctgcagcgcaaggccacggacggggccacggacgggtgcgggccgcccgagggcgccgacgatgggcctccatgcgcaacgcccgaccccagggaccaggcctccgccactgccaccacgagggcctcgccccagagtggctcccgggagccctcgccgagggacacccccgggagctcccctccgagggcagcccgggacccagggctccaggtcaacggcacgtgcggccgccgcgtgcggtgctccggccccgtggactgcgcggaggaggctgccccgggcctgcgcatccagcaccgcgcctccagcgccgacgtgcgccaggtgaggctgctgcccctgggccccgatggccagggcggcccggccgcggcagagcccaggcgctggtccctgcagcacgttccagatgcttctggaagctctgggaagcggtgttttgtcttccagttgcagcagccccaacaaggcgcttcggggccaggcagcgacctcaactttggcttcacgggcacaaagggggacaggttggtgaggtatcctcgcattcggctggagaggagcacctcgtaccccacgcagccccgaagcgagcgagggagccccacggaagatcggggagccctggaggcatcgcctcgagctggcaggatggctcctgaaatccgcaggacgaactccgcggagaggactccgcagggccaggggtgcacatttaagatcaggcaggatcagaacgcggggcagcagcattttagaattcttgtaacccgggggccggaagaagctccccagaatcccgaggagaaaagcgccaaaagccctgtttccacgggagctgacaccacggtaagttcacagcgtgtttacatgtgtttactgatttcaacttcgatgcttactctgcggcgtaaccaaaataaaacctcaccctctgttccgggagtttccctgcttcaggccagtggatctgaatgtttggccgagttctggcacgatgatttgtggtccagtgtttggtgcgcaaaacaccatttctgcaaatgtcttctgtaggtcctcaaagtcaaagaactttgtctgtttgggaaatccaagcagaataccttccccctgcttttatttttctgaatagaagaatttcgaataaaatttgttactttaatctgccaaaaaacaagtcagtgccccaacgtgctgatgttggaattgcatttaaaaagctgcttgcaagtatagcctgtgacaatactttaaaaataatcagttctcggaaaggggaggatattgcaaaggacctcagtttcgtctcttaatagttaaaataggtgaacgtaaagtttagtggaatttgattatctgtcatggcctgtttgctgcaggaggtcaggtcagtcgttgttatataatttgctttgttttttgtcccattaagtaatactgaacgagagtagtgtcgcttgtgggatagtgacattactatcccacaagtgacactgctaagatactaacagatgcgtttttaaagcacattgggttatggcccaaggctaggggaaactgatggggactcgttaatggtcagatggcgtggcgtgcaatttaacactgcacacttgagtgtccaagccgaggatgctgtatatagaatagtaagtaccctgtctccagctgtggagaaatagacgccttagaacagattctggccttcctgtttctctgttcctgatcgctccctttcagtgaaatggagtacagagagacagctgcacgctccatcgaccaggcatatgatgactctgcagctttcgtggtttagagtggaatgaaaagtttaatcagtttggtttcttttactagtaatcactagccagtgagtgctttctcctaaagaacaagctccttatattttgaattggatattttttctcctgaatttcatgtgactgccagtttgaggatatgattagtaaatgtctaggggacttttctttggatttcacttatgaattgtgattttgaaaagtgagcgtctgagtattactctagaattgtattgtcttttattgctttgtgttcagaaataagtttcgtctttcaagtaaactttatcactcctccatcattggttttcatcattttgaagatacaatcagatgcttaatgaaaatttatttttcttcttctctttccttccatgtatctcctttctttcattatctcaaactcttctattgggaaatggctaagtgctttgtcttggtctgaacctataccatgtattacacaatggtacaaattttgacagtgttttgatattatagtagcctttaacgcccacccccaacaaattaccatcatgacagttgtaggctttgttcggcaacacaattccatgctgaacttggaccacttaccgcatgaagattgacaaaaatatatttcctaaagtttgataactattcaattatattaccaaaaactgaaatcactttgcagttctgatgtggaagacaaagggattcatacaattaaactcaaaaaagttcaaactcatttggtttgaactttcaaatgtaattagaaaacaaatcgaataaactaaaacttatgtgtaccttgcttaaaagggctattctaacttgcaaggcctatgtagtgaaaaacaagtttctacacatttggagaatataaattctggaataaagagcttttcttggagagtaagttccaactagtgaacagtagtttgcattttcatatgtatgtatttttgtacacatacataaattagtacgtggttagtaagctggttttcttttaagcaaaacgatttttctttaaaaaacaaaaccaaaagtggtcacataacaaaaccgcctgctccattcagcaactttgtatgcatttcatatggacaggggtgttaagtttaggcagcagctgccaccgccttacttatcttgaaggaaaacattcacttgggcgtctacagtctggctgctaccaagcttttttggcgtttcaaatatccactgctttggtctaaaggacattacattattaagtttacatgaaaaattagctagaatctgttgcagtttggtggtggaatgatacggaaagtcttcctagatttgggaataccgctcgggattcatttgacaacgtgctcatatttcataagctatactttagaccttattacaagattaagttgttgagtacttttatctgtgcctcccaaacatcctgccatgactaaatctaaaatgtaacatgactccaaaaaatgttaaccaactaaattattagaaaaaatacaggggaaacccttgtgatgataagttttccacctggtttatcactgtcagtagacaagaattcattcgtatagtcatcaattataatcagttaaaaattttcagaattgttagaatttaccaattcagtctgtggcagtcattagtagtcatttagtgagtaatttagttattttcttataaattagcttttgggttattgggttctgagcctcttaactgcattagagttattctgaggaagttggaccaccatttaccagcatttgtgccccctttgtatgccattttgtgcataataactgtgaaactctgcattttacaagcttgaggagccagttttctaatctcattggtgttatgaagtactcaaggtctactgtgtatataacattacacccgttacttggaaagtttcagggactatctcagtgtcttgctgacacagtttgtaatgtaaacggagggaggagggcccacccggacaaaagcagtaattctaacacctactgcatatgctattggagaagagagcgttctttcagctcaagctctctggactttcctctgtgtcctctcagtggacatgtacttcacaggagtagtgtagtaatctcttgtgattaaaaattacttttattgaacaacaaaggaatatccaaattcttttcatttggggaaactttgagtctcttttacagaagatgtttttaatatacggccattttttgacattaatattagtcgatgtctgttttttaccctaaaaataactcgagtatccaatgtattaaccacccctttattttaaaacataacaacacaggaggcgaaggtgggaggattgcttgagcccagtagtttgagattactgtttctaccactgctctacagcctgggcagcagaacgagactttgtctcaaaaaaataaaaataaaacttaatattgtaatggagaagaaaaacaagtagcattcttttcattgacctggtttctgactggattcaatcaactttctttcttctctcatgtatagtaatgctctctcttaatgtggtcttagaataaaccaatatatatcttcaaatgtcacctgttttcagggatgttttgaaaagttggataggcagtgcacaaggttgacaccgatatgtttgtaaacagaaactgtacatggcttgcagcatagctcatgtttctgtagcacttcacaatttgaagaatgctttgtttatttcacttaatatgtatggctgtcccattgtggaggcattatctcacttgaccctcccatgtgaaatggtgttatttcactgtttcagatgaaaggatgtgataccgttgttaggtgtaataacattatgtgtatatcatagtgtatactatgataccactttgtgcacctataatgggaatgtgtatttatgtgtgtgtgtatatttgcacaattaaaaagtatatgttaagccaaaaagcagtttaatgcttcctgtgatgtgacagtttttttgaaaagtttagaggtggtaacttcatttggtgtcttgcagcactggcctgaaggtgagagaaggcttctttggggatccaaagagccgtcctctgcagttcactagcttttggtcctggagtacttagactccctctctaagcctattcctcatcagtaaatttgaggataaaaatgtccagctcgtaggttcatagttaggtttaaatgaaagtgtccatggaagtacctgattcgtgaaccaggtatctgtaatatacaagtctttcccctagcaggttaattaggttaattgtgaacaaccattttttgatcagtatggcatttaacacaaggacaacatgcatttatggcatacctggaaatgtttaataaatagctttgatgctctttctgttgtcatctcatctttcctaagtatttgtccctaacaccaaatacagtcttggaaaagaattgcttcctgaactatgcattatagaaaaggactcgtaagtatatttactgtgttgattttgaagccttataacattttggcttgcatttctagcatattttttaccatgtcattttgctgtaatatttccagtggttgagtctactgttactttggtatagactgaggcttttgagaaacaatatagtgttatatctacaaaatttccacattgtatgactttaaaatgagggagatatttgggaatatgtcttattttaagatactgtcttttagagagttttcataaatggtgcagctgcttctcttggctaagcctggtggcagaattcctagtcattgaaataaatctctaattttataatacatactgataagaaacttgctatcttttcataaaagttcacagtaccagaataaatttactttatgtaaaaactaccttaaaatgtaataaatgttggatagttgaatggtttctggatagttgatgaatatttctgtatagttgaggcgaatctaaatggtaatgctacttgtgcaactgtcaatgatctagcacattttttaataaaaataattacctgcatattactgtgggcgatacaggttagctatcctaaatacgtttttacctttttaactcttaattatattaagccatttgcaagaatgggaaaaagcaggaaattcataggtggtgttgaaattgctgattctacacaaaggtaccagaatgtctacatttcctctgtaaatgtcaaaggaaactttggaaacccacctcagagttggctggtgattattcggacaggttatcatcctgtctgcaaccttctagttctcttagttcataccaagcagcatgatattccatgtcctgcacaaaggagagcaccaaaacagccttcacctgctgcgtatgccccactctgaataaaaaattaagaaggccaaaggacggaatgtgttaaatattagcaaaagcaggtattgcagaatgtctatacatttctgggcaggtggagattattgaaagatttttagaaataatcttcgttcaccacattccagtgccaggccctggacttctgtctctatttgtgataaaatgtttttaagaaatgctggctgggcacggaggctcatgtctgtaatcccagcacttccagaggctgaggcaggtagatcccttgagcccaggacttcgagaccagcctgagcaacatggcgaagcctcatctctacaaaaaatacaaaagctagccaggcgtggtggcctctgtctgtagtcccagcttcttgagaggctgaggtgggaggatctcttgaacccgggaggcggaggttgcagtgagctgagatcgtgccactgcactccagcctgggcgacagagtgaaactctgtctcaggaaaaaaaaaaaaaaaaggaaaagaaataatcttctctcagtgagcatgttgaatgcataatgttctcactggagttctcctttggaatctcttgattattctgctgtggcttccttgggccaactaggatacagaggagaataaatgagtaactcagtgagacaggtggcctgatgtgagtgggcctgaaagttagcccctgatgtcctggctggtttcatgccatgtcctaaacgggcactttcctggtctctaggcatcaccatgttttgacaggaagcttagtttctttcaggatggaggatggaatcaattgtatttcaagaagcctgttttttatgccctgacaattttagaactgtggactgttctgacacttttgagtacagtgattaaatctctgtgaagggacaggtcatgaaatcaaataaaaggacggatcataattgagctggaagggggccctcctatctctgatttgactcgttgctacactttagtattcggaaactttgtattggttcccttaagtgcctgcacaacctccctatttctggaaaccattcagtgtttgttttaatgttaagcattatgccacgtatccagtaagcagagcagagtaaattcctccaggtagcaagagactggaatttcccccaggcagatcagcttttcacaggttcctagagtttacacagccttcttttgtgacttaatttttgtagatcacagtgagtcaagtgacttttacttccctgtataataactttgaggagcctacttgcaacccacatcatcactcattatcttgcttacttctttcttgggggttagatgggctggggttgttattaagcatgttaaatactttgaaattcaaatcgtttctgatagatttagtttctctttcttctattggtcattcgagagctggtagacttttaaaatacatttaatgactcacacatgtcataactcatccatttccttgacattttcaagcgtgataataaatcctacttcttaggcttttttttttttttttttctctctctcatgttcttttcaaatgcatggctaggtagttacctcatgaaggaaaacaactgttttggtccagattttaaaaattgagttgaatagaaaaggtggggtggaaccagcaatactgaaatgtaataatgtatattaagctccaaccaaacaatccagcacttcttcaaatccaggaggtcttctggctaggagttacattgcagaactaacatggactcttaaactttgtaaggaattagtcacagttgaacactggaaactatcagcatacctctgggcttcttttatatggtcttcctcatgagttaaaatgccttaagcatagtatctgttccataggaccttactgattatgcttttccacttgaataaaagagatattaagttgtaataaaactttaaatattttaatttagtttgaatatttaagttgaattaacctcttactacagtaattatcttttttgctaacttcttactacggtaattatctgcttttataaaatccagaaacgatgttatacacattagcacgcattattaggtgcccaaatgccaaggctaaggacacagcaatgctaaggacacagtgtgcctccggcctgcttgcaccctcggttgaaattatattagcaagagaagctcctgcattctgcagtatggcatttttctccagctaatgtatgcaggggtcatttttaaatgttagattcacagatttgcagagctgtgagttgccttggaaattatgctggccagttcctttaattttaaagatgaggaaagtgagaactttcctttttaaaaattgatacataatagttgtacctgtttatgggggtacatgtgatatcttgtacctgtttatgggggtacatgtgatatcttgttaacatgcatacagtgtgtaatgatcaaatcattacatactgaaatatttgaaatatctgtcactgcagacatttgtggcatctgtgtgttaagaacatcccaaatcttgtcttctggctgttttgaaatgtatagtaacttcttattaactgtcgtgctgaggacatggactactgtgctgttgaacactagaacttactccttcatctgaccgtattttcgtacccatttaccaaccctgagagctttacttttgcagtaatagagaatattctttttctctcttgagtatgaaataattatttttgaataatcactgcacgtgaagccctatccttcttgacgttggacatataaatacttagggagcttggtttatagagctttcagtttcacaaacagatgggacagctgaggtgaggcctgcctagcagaagaagccttactcctgatagcaggcactaagcaaggcattgggtgacagattgcttatgcacaggctgggagggacaggaactgtgtcatggaggggcaagactggaactagatgctgaaaagtgaccagatttgtctcagtgggccagtgggaggggcctcattgaaagactgaaggtagatgtgcctcccagggatgtggtggtcatattggctccaaattgccttgttcattattagcaggtttcagcaaattatttttcatgtgaaacgttgctgaagatttcttgggtgtggctgtcatcacaaacaattcctctcttttccatcaaatgtggagttggatgaattccttccttgctggcctgccttccacaaagctgctctctgaacacctgccaggccatgctgaggacaaggaaataccaaggcacagtttctgccatttaatggtggtagcagagacccaggaatgcaatggattattgtcactttcattataacatcatagtgtaggatcataactggaacagagaggatgaagctttcttttggggaattgagggagggagacagggtcttgctctgttgcccaggctggagtacggtggcgttaagatggctcactgccacctccacctcccaggctcaagtgatcctcccacctcagactcccaagtagctggaccacaggtacatgtcaacacacgcagctaattttttagtttttgtagagatgggggtcttactatgttgcccaggctggtctcaaacccctggcctcaagcagtcctcctgccttggcctcccaaagtgctgggtttacaggcatgagacactgtatccaactaagtaggctttatttatggagtttataaagaaactgtttatatatacaggggagaatttatcctgaagaaaaactaaagaaatgaatattttaaatacgtctctgcatttctttttgttggatatgacatttatgtaagaaaaatgctaatctgtatgatatgagacatgttaactacatatggtacatgtatttaaatatcatatgtatttagatttagcaacaaaaagggaaatataaaccatatttccaccatttgaacaaatcgtattcaattatatgtgcatataaccatttgaaaaaattataatgttgatcggatctgcaacctaaaccaagtgccaaattaaattcaggatagataatttcatataaaatgtttcacatcatagaaaaagcagtgaaaattgagtatcagatctgtgaaggatgatacatttctaaccttagaagcagaaaaggaaatcacagaagttggatagattcagccatataaaagtattaaatttctgaaccatgaaaaaaataactaaaatgagggaaacaccagatgtttttcttagtgattcatgtaagttctcatatgtatatcttttcagtgtctaattatgtgcatattttggccagtgggtttgtatctctgtagaaagttctagtaaatactggagaaatactgaggttcccccactccagctctttcactccattgcaaagtaggtcttgtaggtgaatcacacaaacggattaacaagaaagacagaaatgtccagctcccaggttcttcattatgctgttgtgttgtgccaatagaaaatacaatatatcaaattggagaacttgtggttgaaaataatatacgcagattgctggtggcagtattcatggatgtgactttggagtgatttttaaacacttaagtatttttaaatgataagaccaattataggtactaagagtcttgtgttttgaagtgttggagttaatccagataaagttacaaatctaagcagacaccttattaagagatcattattctctgcttttaaagtggacttgctttctatatagttatgaagaacagatagaaatgttttaagattactggctactattaaaataatctggtgactgcagttatatctgggtctaaggcattagactttttggaaaatggatgcttttaatctttccttccgtatatttgtcacccagaattttaaaatttggaaatttcattcattcagtccagatagagaattgatcaattggcaattttattatttttcgctcatgaaaaactctagggttacaagaatatgctcctgaagttaacatagttacttttaaaatgtctcaattctaatggttaggtattagtcctctgagttccggttgccccttaacttggatcttaatttacagtttacagaaaattgttcatatttcatattttaagatcatgtactctaaaaccctattatacttgaaatgaagacctgttatgttatactagaatctctcatgaaaatgtaacagttcccaaggaactttgtttctgtctccatggaccacactggctactgtactggatggagggcaaggcgggagctgagaggcctttgcagaagtgcatgtcgccttagtatgtggcagatcctggtccctggcctgtgctgtttccctccacaccctttgatttctccgaataccaggaaagatcatggattgtctcgggagttagtctcccccttagtacttagcctgtcattttcatgttgcaatgcctagaaaatgggaggtttttcttctccttaaggaagtgttatttcaagatgctttctgctgcctgtgtcatgccagggcgtgggtggatatatttttgcacttttgcaccagcgagtctgcttctgatttgcagattgcatttattataaggcgtattgtccattgatgaataatgtgtgggcattaaagcaaagctgatacatagcttttaaaatagctcatttatcctgcaagcttcacccccatagagaggcaggcccttcagaagcgttttccaggagcaaggtttctgcatgtttccctcagttttggaggtcgtcgttttttgcccctactgtgggggccaagggaaaattgctctgcgccttctgatggtcccctgaaaaatcaactgtcaaaagcccaattaataggagaaatgccatacaactttattaacgtgcatgcagattgattaccccaaccccccaatggggttcagaagcttctataccatcctgaggttataggaagaatggggctcagagcccgaccaaaaacagggtatggtggtcaatcaggttatggtggcaagaaagattcttggagggagagaagaggaggcctggctagcagaggtggccctgtcgtgtagatgaaacctcctaggtagcagccctcacagagaaggcagatgtttctttcagacctttaaagatgtcagactctcagtcaatcttccctagatctggacaagggagggccttagagaaagatggcctcccatcagtgcagtttcctccccaggtgcaaatctccccccacagacctgccctctgaacagccattcacagtgtatcaaagaggtatattttggggtgaaatatttttattcccttcacccctagtttatcatgtgtttccttgatgggctgagggcttgacagatgagcagatagacacaatcttagttcatggaaaaggcaagaatagagatgggtagcggagagtttttaagttgctgctgatgaaatagacactcctttgtctcagctactgaaaattttctttagaacgtggatttaaataaagaaagaaatagacatcatgctttgtaatgaagtcctttggtcatcgtaagtggtcacagccagtttatcctcaggcttctttaagctgaccagttaaggtttctgcagaggttctgtgtttgagggaggagaggaagtccttggggaggaggggagcgttctatgggagacagtgctcttgggagcattctttcaatctgatacccatgcaagggtgatgacaaggtatggccttcagtgactcagagcctcctcccttcccaagcctcaggcctgaaagtctggtgatcctccctggcagaaacctcactggggatcattttttccttttgaacaagtttcttactttgcctcatatgttccaatcttctgtcagtggccaggtgacatctgttggaatgctgatgtgtgttgccaagcaaaacagatgcaggaagacttgcccaaagtgggggaagagagggaggaaagggaggaaaagtgggaggtagagtgtgttagctggggagatgggatcgagcagtatttatctatagaacagatatcaaagattgggtaaatcatggcttaaaactctcagaaaagcattctaggttcttgcacatctttgcaaggctactgaatggctcatttttatttcccaccctgcattcagagtggtgtttaaatggctcaccgcagcaaaaaggattaggtattacccttgtgctcaacacaagtctgtggtcagcagatttttaactttatcctagtttattgatatttctgtcagtgaacaggtttaactcttaatggaatagaatctaccaagaataatgcagactggataaaaagaatttcactgattttgattatttagcacattaaaggggacccctggccagaagtagatgtattgcttgggagaggagggcatagtacccaggtggtacttcagggattctgattttcagtcagggttgagaaaaactgatttaagaagttaatgctactgacagcctaaatctgggtttccttgataacctttggtgtaaatactgatttaatgcatttttttttctcacccacttttccttcatcaccccaaatctatattgtgttcacatggttcctctttctagaggtgggagatgtccttttatggctcagaggtccacaaaataaacttgcattcaagcaaggttgtaaaatacctatgcattaagagcagtccagttgaatatttgcaaagcatatataaaagagcttctctcctaaaataactgaaatgaaaggattaattttctctcagtttcctactgcaagaagtaagtaaaagtggaattccaattctagccatggcaagaccggtctatcctgttatgtcttgtgtgccaataccacttttctccaggtaactaaagtatctccctgctgtaaatattaactgagtgcatttttgtggcttttgataactccacgtcttgaaagtgttggccagttgtcaaattttcatgaatttcagagaagtgggtaataggtggtttctctcacggtatttaaagcgaagtagtaaagaggaaaaagactgaaaaggtaacctgggtcaactcattttttagggcgcacagaagtgtggtagcggagcctggacatcaggtggcctgaagcccaaaccaccagctcccccagcacaggagagtgcaaactgtagctcagtcttggccatctggggtcttctgcaaatgaactgcccatagtctggccaataattcacactgttgtattgctgtctttcattctctcttaagtagagcgttctgaacatatctgaacaattttttgacacgctgttactctcctagccacaggttattttatgacctagtcattctttacataaataaacatttatcaacagtgctgtctgggcctagtaaggtatatagcctgctttgtttctgcattaaagttcttagaccgccatgatcttgagatgtttgctgcttattgtttctttctgatttctattgcttatcagttactactacttgtggctccaaggatagaggccgattccctcttctaatttgctgcctctcatctgcttgaagtttaggtgtttagtcaagctcactagcattgtttataaaggaagaataaataggttgagagtgaggacttagggtagttacctttttaataatgtatatgatctgtctttggtctttctccctcatatctctgctgattttactctcgtcctcctggaacgtctctggaatcagatagatttttgtaagatttggatgtaagaattcagtggaataatatatactagctgtttagcctagtgctcggcacatattaatgcttaataaatattagctcttattattattgtttttttccctgaaagagaaaatcttaattcctcacagatgtttaggaattggatatgtagcaaccctatccactgaattagtatcagcaaacacatttttagttcatcttgatttttatcttcattgggattatgcctttatccctttagggttaatgaatttcctactgtgctgttatggaagaaccctgaaaaaaaaatcaataaaatgtatccttaaaaaagattttatgattcacttgactaccaggtgtcagcaacttttatttttattactttaagttagaaggactttgaaggttttcgtggtttattctcttcttttttaaaggccaaaccaagatcactttttggtaatggctacctttcctctgaatgtatttctcaaaaagttctttctggtttttattaaacccaaacagttgttataatttaaaagttacccttttagagtgagattagctagaaaagaaattaaggattattttaagtaactcagcaagtaaccttttccaagaagcttagattataaattaacgaaaaccaaattataaaccaaggtgtatggttgattgtgggttaagaattttatcagcagttttgctgttgtatgtaccagtcgtatattttactactgagtagaagaaaagtctaaaaatcaagtgagtagtttttccttagctggttatcatgtttgtttgatcattatattaaagtgctccttttatttttcgttttgtatgttttcccaacttaataatgaatgtgcttctctctaatctaatctctgaatttcaggagtctattaataaagtatgtgtaaagaattagttgctaattttggatgtggctgaaatgagattgtcagcaaattacaacttcaagcctaggactgcagtgttatggattgcacctcatccttggttattgaagatatattcaaaatttatgaaaaatagaaaaaccttattacttctgaatttttccacgttagactttccttatacttttaagatagtgaaagtgttattatataagatcatggaaagtttgtctttccagacctattttatgttaggattttacaatattaaattcataagataatagtagagactagaaaacaaatccttactgataatgaatttcctaagtagtaaatacaaatgaatatttatttgtaaacctgggtgattaagtaatagctgttcagtgatattgatggaaggaaattaatattatttaatccaaaggccaggcgtagtgactcacacctgtaatcccagcgctttgagaggccgaggcagatagatcgtttaagctcaggaattcaagaccagtctgggcaacatggcaaaaccttgtctctccaaaaaaatgcacaaattggccggtatgtgcctgtagtcccagctattcgggaggtaggaggtaggaggatcacctgagcttggggaaactgaggctgctgtgagctgtgattacaccactatactccagcctgggtgacagagcgagaccctgtctcaaagaaaaaaaaaaaaaattaatcccgaccttcctccaaaaaagaataaattaagtccagaaagtttggtgattcacttgctgttgccgcctttataaacataaaagtcagtaaggctaagggacacttctgaattccttctgctgtccaggtactgtgccgagttctagagatgcaagtagtacataagacagatgtggcccctgcccttgtggagactgcagaccatggctctttttcatgaatggtagagacactcataagtcaaatacctacatattttcatgaatgtgccaaaggaggcaaacaggaagctgagacaggaaatcatggggaggcctacttgaagagaggtaaggaaacccccaactcaggagtggcctgtaagctgaggcctgggaaggacccctgtgggcatggccagtggaactgcagcggaagcagccgttcgcccaaaggtcctgcgctgggaagagagtcagagatgctggaggatcagaaagggatcatccaagtgagtggaggagacagtggtccaggatgagcttaggggaaaacaggggcccctggattgttcacgctgtagaacacagtcatgcatctgatatataaatagcatggagataccctcagtagatgcaaaactcaaatgagctcagctgctctgaagcctgggaaaagtcagcaatttgtaaaattatgacacatccacattttcacaggaaaaacaaagactagtatgtaacatctcctttggtatttacagaggatctctctctctctcgttgttactcttacaaatgataggaggccacttttgttttccaaattctgtgccagatatcttgcctttcctgagatatagacacggtagagtcaggagtgtgtgtgagggcttgcagacttctttttatgtctttagaatccttcttcacttttgaatcatttggtccaggagtttaaggccttttcatttggcttttgttgttcatttgttgaacataaataactgtgttcattatgcagacaccgtgtcattgttgacaatttggtgttgtagattaaggcaacgtgaccatgtaacaagttgggcaaatgcacttatccattcagtgagctctaacctacaaggtgttttgcttcagaccaaaatggtagactgcagaaccttcggcgcggattttaagtccatctttaaaaccataggtagagattgtatctgtgtgttcttctttaattaaaaatgggaaaatgatgcgacagagcaaagacggccatggatcctttttatccctctcccatccacacagagagtttatttcccctcccctggagtccaggctggccttggggttgccctgaagtgatgccgggccctttctacacgtagcctttcaaaggaccggcagcttccacttcctgccttttggaaaagcttgctttagggatccagctgccacctaaaggccctgaagtgagccacgtagagagaagttccagctttctagcccatctccaagtgtcaggcaggtgagtgaagccatcttggatgctccagcccatcaccatccaactatagtcacataagaggccactgatgggcccagtccgtctccacactcctgagagttagtaagtggctgtcgtgttgggctctgaagttgtagactagtttgttagtgacgtataaccaaaagagagagtgtacttaacatttagtcctgggaggttcgaactttgcctccgcctgtacgtgagctccctggagtgtgggatgaaggagtgcttggcccagttgttttcccggaagctggaggagggcagccatgcacaggttgtgtagaccaaacagttcagggatgcacttggcttagacagctgataaacagctgcagtgcccccaagggagttgaaagagtgggtattttgttgtcaggagtagaattattcaccttgaagaacagaagatttgtagtttaaggaaattcaccatattcttaaaagttgcagaaagagaagagttcttagcctaggcctgcaccaagatccagttcttttgaatctgatttaataggcagatgatgaaggacttattcccaataataaagaatagttcaataggaggttggtagtcttaattgtcttccttgtcaaatcctagtgaatttcacatcagatactgtgccctgtgaggctctatcaccttagcacttggtaatacgttttttatgtagtaggtgctcaataaatgggttgagtttctataataatttgatttctgtagcatctgatttaactaagtttgctataaaacgaaatctgctattgtattcaacatcacaataagcagtatcagttgtaaatcatacctacatacagttaacccttgaacaaagtggaggttggggtgtcagcatcttaacacatagttgaaaatcttttgactcccccacaatttaactagtaatagcctactgttgacagaagccttactgataacttaaacagttgattagcatatatattttatgttataaaaattaaatactgtgttctcataattaaactagagaaaacgttaaaaatcataagagaaaatatatttgctatttattaagtggaaatggatcattgtaaagtctacatcctcactgtcctcacattgagtaagctgaggaggaagaggaggggttggtcttgctgtcacaggtgacagaggtagaaaatccttgtataataagtgagctcatgcagctcaaacccatcttgttcaagggtcaactgtacttgaatggatttttttccctgtcataattaaccacccacacacatcttactagaccaaaaaagaaaacttgtcaagcaaataatctcccatttcttgggtcatttggagagataacacaggccaggttatatgtcctgaaagatgagaatgtgtgaagtccccagagagtctgatacgaggccttcttccagggagtagtggtctggccgctgcaccagcctgccccctgccatgccctgactcacctgcacatcatgggtgctgctgatgcccaggcttcatggctgagcatggcacccttagcacccctcacctgttacccaacggagatttgtgggtcggaggcatttcaattggagaaggatggaatggctgagggcaggaaaacttaacaagcaggaagtctgcaccctggctgcacatgagaatcccctatgggcattgaaagtagggggagcattgaaggtagggggagcattgaaggtagggagcagtcaggtcccatttcctaagcggctctgcaggcctctaagcttgtcagtcatctttttggtgctgtgtggactagtgccagcaggaacaactggatagttttaagtctttggcctcttctgacactttttaaaccaaacattttattaaattctcattcaagttaatagcaaaaaaatattactactggtttcatgtttaggtctcatttgcagtttttaaaacaacctaacggagtatagtaaatacataaagtactcgatttaatgtgcattttctttttcgttttttttttttttttttgggtggggaggggggtggttttctgagacggagtctcactctgttgcccaggctggagctatctcagctcactgcaagctctgcctcccaggttcaagtgattctcctgcctcagcctcctgagtagctgggaatacaggcacatgccaccacacctagctaatttttgtatttttggtagagatgagttttcgccatgttggccaggctggtcttgaactcctgacctcgggtaatctgcccacctcggcctttcaaagtgctggaattacaggcgtgagccaccgtgcccagccctagtgttcattttctgacaagttctatgaaacctggtgacttaacttttctgaatctgtttccctatttgtaaaatgacaatacttgcagtagagtttatgtaaggaattaatgagggtaactttaagatctttgtaaatgctaatgtgttttacaattgtggtcagctataataataataataatattattattattattattaataaaatgcttactaggcgaagttaatagctcccacccattcccaaactacttaaggaggattttaagctggaaacagttaaggaaagccgcatgatgccatgagcaaagccttccatctgcacttggcatattgcagggtctgtagttgctggaatgcctatgtccctggttacgagccttgatataattgtgctaaggcattttggtggagtggaccgtgtcctgctgttgatcaaacatttctgtgtggagagactttgtttttcccttggggagtatttattttttagtgccaggctccgggttggctgtgctacgcttggcttttcagtgccaggcatacaaccatgtcagaagggggactgcatggtaggtctcaggaagaagggccgaggaagaggagaaaagggacttggctgtggacggggaatcctgtgtatcttggcttctctgagccagctgtgcctcagaactttgatttgatctttgtaccccatgggtcctgccaggtgaggggcacaatggagaagagaaaaaaaaaaatgctctgctgaaaacataagcaacaaataaaatagaggatagtaatcctaggataatccccgaggcagcagagaaaggcaggctctggcttgcatgtcaggagctctcttcctgggggcaggagggagggtggtatagtcccagatgagtgcttggcaggttgtttagagcctggtagcagtgaaaagaaatgtctaccaggcatcttgtgcatgtggtagatcttgacttgtaattgtggcagtctcccctaggctcctcggcagctaggtgacagttgcctgctagttcatgggtcaccttctcaccctctggcttgcttctcagtgggtgtaaatggggtaattaaaacctgtggttttagactttgctccaaagactgtttctggggttctgcagacattgacctgaaatttatttttattatttttaacgtttaccacctgtgaagatactgtacatttaaagatataaaatgtatcatattaaaataaaatagcctgtatgttttacattttgagattctgtttatgctgtttttttaaaaagttagaaatgtattggcatgttctgatagcttatttttaactacttctccattgttgtaatatcataacaggttggactggctaggctatggtcagaaattgcttatcagtgttttatacatacccaagggattccaacacagggtgtccatggtcctctttgagaaaactttgtctaaaagatattgaatgatgcctcattaaaaactcctcagaaatattttctcctggcttgttttcgccttccgtgtcattgtttgagaaatatccaagattccttcttttttacaattaaaaaaaaaaattgaagcaagtccataatcccatgtagttctttgatagaattaaacttcagataggcataagaaattcagataggctttctctccactggaaatgcatgcctttcgcaatcaacagtgtatgatgtggtctgttctggagttggggtctgacccttcagcatggccagcgctatctgaagatcagaaaccctggaagccccttgtctctttttcatcttccacatctgtctggcgtccaggccctgcccctcctgcctcttcactgccactgctgtggccagcctcttattcagaggagtttcctacctggttagacacttaaccacctccagacggaccccttctaatccacgtcccacattatagctcaaaagtatggattttacagatcttatcctctcctgttctgccaaaaccccatacggtcctccattaccaatcaggtgaatcgacttgcatttcccagcgtgtccccacacccacaaacactccatgacactgggcccgtccctgcctttattccctgtggcccctgtgtgcaggagccttccctcccctttctatcagtccctcatgtacaggccttcagccccctcactctgccctgttcctacctccatcattgtgccatttatgtttgcatgtctgtcttctctgtcatatctatctcaaactaggttgaaaattttttgaagatggagattttcagaataaaattgttcacacagttatatatttgactgattatacttttatttttatttatttattttttttgggatagagtctcactctgtcacccaggctggagtgcagtggtgcagtctcagctcactgccacctctgcctcccaggttcaagtgattctcctgcctcagcctcccaagtagccgggattataggcatgtgccaccacatccagctaatttttttttttttattatagtagagatggggttttgctgtgttggccaggctggtctcaaacgcctggcctcaagtgatccgcccaccttggcctcccaaagtgctgggattacaggcatgatccaccatgcctggccgattatacttttttaatgtgttagttaagatgagagagtccaaagtgatacagcccctgcccccacagagcttccagtctagtgagagaggcaggtaccaaaaagataatgcacatgacagaatggactgaactaagtagtagtagaagttcaaacgaagaagaagacacaaatggataaaagctatggattctcaggattgaggatgctgaaaggctgcacaggatgaaaggtgcgaccaagggtcctgaaaaaggcataggatttatacttgcaaaggagggcatttccagcaagaaggcttggaaatgagaaaatctcgggagaataggcccatgttagaaattcggtacacgattgagaggaaaagaagtgccactggggaagtgtgttgaagcaggtatgtggatgttcttccctatgcagtggtgtcagtaggattttttgttggtgtgagatctgggatctgtttgtaagccgtctgagagctgggactttgcattgatcaactttttgttgcacatgctctgtgatgtaattggcactgcatgatttgacaagaatgtgttttatgctctaaatcaggagtgagcaaactttctgtaaaaggccagatagtaaatattgtggcctctatttagtccattctgaatgtacattagacacaagtttctaaagtacattcacaaataagcattatacacttagttgtaacatacacggatgttgagcagagaaaaagctctctgatttttgtggttcctgctctaagccaggctaagtggtgttgtcagggttccaaccccttccatccctgaagcacactcagcaaaccatctagtttataagccacagtgtgctagtaggtgctgtgtgtatttttttgcggggggaggaggtatttattttgtttttgagatggggtctcactgtgtttcccgggctggtctcaaactcctgggctcaagtgatccttctgcctcggcctcctgagcagccactgcacgtggctgcatcgcttttaaaggtagatgatgcctctggcctttctcattgcctctgggtgtgtggcccatgtcactgtccagcgcattccactgtccagcccattccactgtctggccccatgccactgtccagcccatgccactatctgtgtgttccgtgccactgtccatctgtgtagggaagagagcaccaggggctggcctggtcaggagagctttctgggcaggggttgagggaggcacatgtgagctggactttgaataaaaagaaaggaaagccaaggagcagaccgggcgaggctgggtgcgaagaccagatgtggcagggatttaggaggcagagcgagcacaagtctgtgcatattggtaggttctgtagacttgtcggttgtgcagtggattcatggagcctgtcgaggaagctacctgtgtgcttccactaggaaagcacagccacagagagaagatgaggggcagggaagcagtattgtggggaattcggagtgagggctgaatctgagaaatattattttaaaattatgttaaatacattattttttgctgtctccaaccatcattactatgttcactgtagaaaaattaagaaagtcagtatggcatatagtcccataaccaagaaattcattcattgtgacctatttgagggtcatttaaaaatgactgatgtaatttggtaaaagattaatcaacaaaatgacttatttcataattaattactttccactaatgtgacatttctcaaactctgcagtatttccttttcttcttttcttttctttttttgtttcctgagacaaatctcactctgttgcccaggctggagtgcagtggcatgcaatcatggctcactgcagccttgaactcctgggctcaagcgatcctcccgcctcagcctcctgagtagcttggactacaggcatgcaccaccatacccagctaatcttttatttttttgtagagaaggtgtctcactatgttgcccaagcagatcttgaactcctgagctcaagcaatcatcctgccctggcctcccaaactgctgggattacaagtgtaagctgctgtaagctgctgtgcccagcctatattttcaagtctctctccttttttttttttttaaactggaaaggatagctgtgatggaaatggaagacttccaacagaataccttagttagcataactgtgtagtacaagatgtaaaaacctgttgaagtgggtggccttttgttatcattctgtctttctgcccaccctgtggcacagttctcaccatattttctgtcaactgctaccacatggtccccttctttatgttataaagtctcttaattattaggtaattattcattgtcctagctctccatgcttaccaaacaatattaacaagagcacggtattacaaatgagtcaataacaacttccctaaccttatggcagctgttttggaggaaaaagaaaaaagaaaaaaaaactgcctttttttttcttaatgcgttacaattggttgatcagaacagttttaaaactataaaatgttggctgggcgcggtggctcacacctgtgatcccagcactttgggaagccgagacgggcggatcacgaggtcaggagatcgagaccgtcctggctaacattgtggaagcccatctctactaaaaatacaaaaaattggccgggcgtggtggcagtcacctgtagtcccagctactcgggaggctgaggcaggagaatggcatgaacccgggaggcggagcttgcagtgagccgagatcgcgccactgcactccagcctgggcgacagagtgagactccgtctcacaaaaaaaaaaagcaaacaaaataactataaaatgtttaataaacatattttaaattaaaaggtaaggttgtatctagttatttatacagctatttttaaaagtcaggttggcaaaggtctctctgagtttcacaaaatatccgcgtgagtggtgcatagtttgtgctggcttatttccatttgttcgttgtgtttatggtaaccagtagcattttctaatttggttaaaatgctgtcattagctggtaaatgcagtcctgtcacctcagaggaggaccaagaaggagctctttctagaaagggagggatcgaattactcctcatcctcatatctacttatctatctgattttaagacaccactgaaatttatactgcgagcaatttaaatgaatgcagtaattgattgcaaaacatgtttgtaatatcagtgactgaaattaaataaaagataagtcagtactttttggatcaatccagttgatctaaaaataaaaagtagacatccactgaatggttgggtaaatgaacgaatgaattttggcttatgtcagtgaattggcctgactgggccttgatctacatagcttctcttgacattttgttgcccaaattgagtttgagtgtttttagtaggcagggtaaattagcggtatggatgggtataacattctacatttagttttgctactgtatatgagctcatgaaatggacttcccttccctaataatatagaaaaaagaaaaacctaaggaaatatagagaacacattcaatttgggaaattcccgtctgtatcagtcaaggataggctagatcatgttgatcatgctgcgtaacaaaccacatctcagtgaattaacccacaaagggggattttcttgctcacaatacacaatctgtgtcagcaggagagcagaattatctgtcgtcaccaagagtccccaggatgatgacggctaatcccattgtgccttcaccatcactgccataggtgaaaggaacgtgataaattgcacactgccttatttatttatttatttatttatttatttatttatttatttagagactgtgtctcgctctgtcgcccaggctggagcgcagtggtgcgatctcagctcactgcaacctccacttcccgggttcaagcgattctcctgccttagcctcctgagtagctgggattacaggtgcacgccaccacacctggctaatttctgtatttttagtagagacggggtttcaccatgttggtcaggctggtctcaaactcctgacctcaggtgatccacccgcctcggcctcccaaagtgctgggattacaggcgtgagccaccatgcccagcccatacactgcccttttaaagcctgtgttcgaaagtggcacacatcactgccgctcatattttactggccaaagcaagtcacgtggccatgccatttcagattgggaagtacatttttaccattgcccagaggaggagagagatatgcaatatttgagaatagccctaaagactacaatactatcccttagtccacctaaatgatcctgaggctttggggcaattaaaaaatccttactcttaaaaaatgtcaggcagtaagtcttgaagccagctgctggtgctacacaacatacccttgtcttgtgaggaatcccttttgaaaaggtaacttacctcgtcacttcattattgctcattgctacaggttgaattgtgtccccccaaaaagatatgaaatcctatcagtacctctttgaaaatagggtcttatttgaaaatagggtctttgcagaccctcttgcagatggagtcaagttaagatgaggccatgaatgtggaccctaatctgactggtagccttataaaaaagggaaaatttaggctcagaaacagacatgcacactgggagaatgccatggaaagatgaaggcagagatcaggtgatgcttctacaaggcagggaactccaaagattgctagcaagcctccagaaagcaggggagaccatggaatctccctcagccttcagaaggaaccaccctgcccatatcttgatcttggacttccagcctccagaacttttaaaccatcaatttccattgtttaagctactcaagtttgtggtactttgttacagcagttttagcaaactaatatgctaatcaatatatatttttatcatcttctttggacctagcaaggagaaccacttgggaaattgaaacaaggaccctctcgggaaagtttggtgaaatcctggccaacatgatgtctaatgctgattgcagtgaaattgagtactgttgttgatttttttttcctcaaagtagcttttggaagtgaagagtaaaatgtgttagtgggaactcagtattagcaagaagagaaataagggactatgctagcaaaatgaataatctgtctttattatactgtcacaggtggttatcaagatacagtttttgtgagacaaaaagctttgtggggctggagttgcttttgatggtggtggcagagggagagttatacgaatagaagtaacttctggtagtgtcttcgttgcatgtgggtacacccagtcttatgggcaagctgattttatataatcttgttcttttcagtaaattttgtatatcaaatatttaatcttacttctttgaaaaactttttagataagtgatgtttgcaaattgaagcatattgaaccatatatctggatattttgtttgattataaacccatttttacaccatggccatagagaatggtgccgtgggcactatcaggagtgatgtcattaaccccacagggctatgtggaaagcgtgtggctgggactgctgtgtggttgggacaaggcagtggtgcacatgggccagctcctgtaactttcctgtttgtggctctcatggggcactcctgctcctgctctccccgtcctcatccatgatacatactctctctcatctacgtgctcataaatttcagcagcaagaactgcatgatttttaaaattctgagtagatgcttccagcaaaggatttcctaactgatcactgccagagaagaagaggtgctaaatagttgccaagttacatgctttttttcccaaatgaagtacttcccctgctactgcttgtaaagccctgattgtgtgtgtgcgcagaacccacatctggtgctggaagcctaaggactagtgagtggtcatgtggtttatggcccctataaaaggacccattctaaaagtctccaagaagctaactccacaatgagatgatgtgtgtgtgggtgtgtgtgtgtgtgtgtttgagatagggtcttgctctgtcacccaggctggagtgcagtggtgtgatctcggctcactgcaacctccacctcccaggttcaagcaattttcctgccttagcctccccagtagcttggattacaggcatgtgctaccatacagaattcagattcctctcctacccctagcctgatgccctttcattagctatacaaaggtggttgagtttcaggttaggcttattatcgtttaaactataaactaaatattcaccaaagctagcccagcctaagcccaggaataatcaaggcagcttgaaacctaaaagcaagaggaggctgggttagatcagctcactgtataatttttgcaaaggcggttttattgaaacctgttcttttttgaaagctggctctttctaacattcaaatgcttttgatcaacctattttatggaagcagaatattgaaattaaagtaaatattagatgaactttatagccagttgttttcctcattcttcaactctttaccctacaaatcttatttaaacaacatgttcagcaagctgttatcttgcttacgcaatgaatagaacattatgttctaaggtacagtttgctcacctatgaaaagaatttaacctcttttctaagtagctatacacaattgtcataccttaagttcttatttagatgcatttcagaatattagagcattttgcaagtagatgcacgttcttacccagtgtcagtgtttatagacagacactcaccatgggtatatttaagtctagggtggtaaagaatataaatgtcatttattaaaacctgaacatagccaactatgaattatttgtgttaatgtaaacgtcgaatgagcactgcaaacatttgatgtttgaatatttgcctgtagaagtgcagtactatgttctatagaatataagtagatgccaccccagtcctcaaggtttcagtgaggtcatcattgtatcaataaaggtgccaatttaagatgctaactggacattggaaaaaatttgttgtcctattctgaaggatgagtcttatataaagtgtttttaaaatactttattgaaactgccatgttcttttcaattttggtagctcccctgcatttaatttagtcataagcgtctgtattaatgggtgtgttcaatatgaaggcatcctgtgaagacaataaattatattatacttatctagtctgcactctttatcatgttgataaaatggcccttaccagtaaaaaaactgtttcagaatgtgtaagagtaagtctgtctcagctgactgagggcttcatcatgttcatgataatcccagcagcttgaaatgtcaaactggtagctgatccatagcacacagtagtgctaattgagataggttggtgtggataattgaatttaattgaatattaaacaccagtaagtgctatgctagatgttgggaccacagtgatgaagatgacattatcctgacccgggaggcgctccttatgtgcataaactgcatttggaaattttcatgatttgagagtcatctatggttgccagtagagattttcccagaaggccaaggatatatggggacatttgactgttctttgaccataattatataactttttatttgcccagaatgaacaactgcagggtaacatttatacaaaaggaatttagtgtgcttagagtgctgataatacttgagaaactaggagagctgttttaaagcacttctttttcttttttttttttttgtttttttctgggctgttagaatttgacattgttcaactttaactttgtcctcattgaactttatcctgctaaggagctaaaaggtccatatgatcaaaaaggcagctctcaacccagcacgaaattccaggctcattcatttctgtttacctactgccaaataagtcagacaactgcatacttgctttacagacgaatagaggacagcatgttgttcaataattgtagtttaaaaagtatatgtaagatacatccacaagaagaaagatagagggagcataccgtttgtcttctagtataggctccctgcccatggagatcacagagtagaattatgatgggtgccttagagaccagcctccctcaggatcatgagttcacctcggcaccacagctctgggcaacgtggaattagacaaattaaagtagttaagttctgacttcatagaacagaatctaaacttttgttcatactgcttttgtgttcttgggccatctgaaaaccttttctgtgtaaatattcctgcaatatgcggtcttacagaggtcttatcacgcatatttccctttgcttccttatgtatcgtattttttcaagaagaagacattcaactttagagacaatggaatcattgtgttgtggctttaattcaggtcattgtccttttgtgagttgcacgtgtgcgcgagcctgtgtgttttgcttggaggaatagtgaataagcaaggagcagagtccatttgctttttctaacagagggtggggcagattctctcacaaccattaaagaaaaaaataagataccagcaataatgataatcagtcatgcatatgtaatcgtgtgtagttcatacttcagattcatatacagctgagcatgatcttgaatgttacaggaagcaagcttgaaagtcaagttacagtagaactttgctaattcatgcctgactaatttgcccacccagtagttcctactgaaatcttgccattcctctaccaactttcagaaaaatttgatagcaggctgtggagaaggctcatgttacttcttatgtcaaggtgtaaacaaaaaagagagcacaaaatacatccatcagaccacatgaagtgaagagagagaaaacatctgctgaaagccggattctctgtttttttcctgctttttaaatgtaatctgtctttgtttatgcatgccctagaaacatgcataagtaaccctgagtagtctcttagtttaagaaaacctactataaaatttcttgttgtaaaataaaattctaaaaggaataagttgtggacatataagtatcagacagtttatgtaagactttacataggatgcaaggtaggctgtaatatgatttggtaattgttttatgggggaattttgttttgtatagcgaaaaagaacagtgagtgatttaactgaattttatagtttaatattgttgttgttttaactaaaatctttggtttgctattgcaaaatgaaagagaaaggaaattttggttaatgttaactttatttccaaaaccatgtgatggatgctgaccaaatgtgtctcaatagtgccattgaggtctgttgcctttttttttctttgaggtgctaagtgaaatgtgttttgaaccttgaatgttcactatgcgacgttctttgcattacaggtagatactgcaaacttgcttcaaaaaaactaaaaagttcaaataactaatggttcatatttgttccagttagtaaatatcacgacaaggtatcatcgtcatcccatgttctcagtatagattcagcttcatttcttacaccacacacccagaggcataaatggaagtacacagacaaaaggaaaggcctgagtttaaatgtagttatcatgttcagtgttcgacattttattctgagaatttaagtgtttctactgcagtaccacaaagtcaatctgcatattactttaactagatcacttgtaaaaataaatgaataaatgaccagtgatggttcagtgacaagagtgccagatgagtcatgaatgttttcacaagtaaatttgatagtaaactgctaagtttactgtatacgctgtgtacaaattagctcagattcaagatttttgctctaacaactgaacgctcagttgcatctttaaactttttgttgcgtgagaggggctgaggggcaggtgggaggaagtcagcctgcaggtgggaggtttctgtctcaggattgctgatacccctgcatgctgctgggttgcagccttggagtatatggcctatgagacatggcatgtctgatttgatggaaaaagcagcggagaaccagtgaaccaagctattccgtgtattgactttttaatacgtttactacaagaatctgccttttaaagtacttttaaataaggttataaacataagtgtgttttggacacagcctgcagcaagcatgcctctcgaggtgtaagatgagtcagctacacatgctcaggggcccgttccaccagccacagtagctgcagagggtgagagcaactgaagcaagagaagctcttagtaattaggggaaggaagcctccacttgacaccgcatcaccaccaagtatttattgagtgtctttggtgtgcaaggcaggagaatatcttctatggattctacatatttcagggttaccagagttataaaatcccttgaaatctatatgcacaaattgtaaatacgtatgcagctttttataagtgttcaaattctgccttaattgtgctcaaggatcagggtctcaccccagcattgtataccattgatagtcatgatttccttagtgaaattaagtaaattgactttcagagactttatttcatattcatcatgtccccatgtagccatgaaaaaatgatatgtttaatattcatctatttgtatgattaaaacaaaatatccgcaactactgacgattcaatgatcagatattttactgtaaattaatatcatcataaactcctagacattagacttcagacattcagagcccactcgatgcttggcacaaagcaggcaccaaatacatatttatagaatgaatgaacaaatgaaggaagaaacaaagaaatgactaatgcaccaaccatttatcaggaagtttaacagggaaattcaacaaccagatttgttttgctaatcttattaaagtgcaacatgtttgttgtaaaaatagatccacattcgtcattgaactggacagtctaaaatagatccaaacccattgtttgattatacttcacaaatgtaaggtaaaatagatgatactatctgtcatttgcttgatgctattggcaaatgtgaagcagttaccagcataaaagcttggaggttactccgaatgtatataaacaacagtggctaggctcacaagtgggagagagtctaaaaataggtaggcgatcccttatctcgttgcattgaaaattgtgtttatatgaagtgatattattagaaatgatgtgtgagaaaagaatttctgcaatgtctcctacaaattagagtgagaaaatgtatctttatgcagctttgaacaaaggattattattgctggactgtggaccaaaattttagtcaagttttttttttttaatgaaaagaaactgttcatttatgcagacatacaactttgtgtcctatagagacttgtcatctgctcttaaagttagcaccctatttttcctctggatgtccactgagaaacccactggtgtgatggtcattgaaaaagagagttgtgtcagaatgccctaaaatcttagtggcttaacacattcccaagtttatttctcattcacactacccgtcaacataggttggcaggcattcggatccacagggtcacacagagaaccaggccgaccgacccacatggtcacacagagagagaaccaggccgaccgacccacatggtcacacagagaaccaggccgaccggcccacatggtcacacagagaaccaggccgaccgacccacgtggtcacacagagaaccaggccgaccagcccacatggtcacacagagaaccaggccgaccaacccacatggtcacacagagaaccaggccgaccgacccacatggtcacacagaaaaccgggctgactgaagtttgcactggagcttttcacagcccccactcagaggtgagataggtcaccttttctcattagccaaaactggtaagatggccttccctgaccacaaggatgctggaaagtgtagtcatcttttctctgtgcctggagaggagagagaagtgaaaattggtaagcaatatttctattttaaaagtggttagagtgtagtgcaatgaatctagcaccattggttcagttttaaatggactgattccatttgtctaattctgtgtcagttggctgttttctgacccctgagaataatttagtctggctgattcccccattgtaccaattgcctggcatatgacaaatgcatttttgcctgtaagacaatctttgcctaggaaagacagccctaatttttatgtcttgtattttccagtaagctaatctggagtatcagtttttaagactgatacacaattagatgaaactaattaaggacaaaacatttgccacttttaactgttgataagtgaaactgagatttccccccaccccatggatacagtgaacatttgtcagcagctggtaatggctagtataaagatgtattcagttttcccttcccttcctctccctccagccttccagccacccccttcccaaacatttatgctcatttagagaaaagcaaccccagttctcttacctgggatatcaccagtataaaaagcacattcgtataaattatctggcctttaattacctgtaaccctgtaggaaaccccctgggaaaagtaccacaaaagaacgcagctctgggggtctgtgagaggcacccagttcacacccctaaaggacagagcgagcactcaaacgcacagctttgggtgccctctgaggcgtgcactggctggtagcagtgggtatcaaccatggaagttcacggaagattaaaccgcaagttcccacgcaaggccaagtggctgccaggacttggaggcactgaccctgagtggtccttccacctcagcgtatactgtcactgctgcctctgtggcttcccctttccctccaagtagagatagatgtctcgaggtgctccccaccccagccaggttgtcctctcctgggtggcattttcctttctactctctggggctttcaccaccccactgggcataactctccacaggctcccctgggaggggtgcccccacctcacccgccacctcacttctcagcccctcttcccatccaagggctccctgggctgcccccaccctagtcatgatctcgctcctctactctctcgtagtactttatttttaccttgctcctggctcacattacatgcttatcttgtatttatagatggttctatatatgtctccttttgcatccttttctcaaagctcctgtgaggccagggatggttttatgccttttctcatccccttatgttctagtataatgctttacacatgattaaattctcatcagatgttgaatgaatgagcttattatgcattacttcttagtacaaagaaatatttggaacgtaagctctgaaatgttgatattctgtggatgcttggattacatacaatgtcctaaataaacacttgcctgttaagtagaagtcagtctggaaagtgatacctttagatccataaaatgtttataaggcacatgaatggacaaccacgttgttttttgctcttttatatgtttaggttactgacagcccaaaatacattagcttgtctttgggctaggaggtacctaaagttgtatttttctctcatgtcattttcctgggtttttatcatatccaacttcgtaatgtccaggaatttgagattaattcctcaaacttgtcgaataatacaagaggaaacttgtataatacagagcaaacttggttggtgagtagctgctagagcaaacttggttggtgagtagctgctacagcccatacatggatttgtttcttcaggtggggggataattgtatccatggactcttcttcattaactgacggatcaaattattttatgaagctatgatgagaaatggcttgtgctcttgggaaaatcaatgccaatgtaggtaatgcaccagtctagctggtttttaatttaaagaacaaattatcttctggaatagtaataaatccccctttggaacagcaagaagacatcagctgttggatatgggataattaccatatgtttcaatgtcgtaaaaaggcacagcaattttaataacccaggttgtgtacaagaaagctcttgcttctgaagaatccatcaaccatgcgctatgatcatgtaataataaactgctgtttacttaatgctgtttttatttaaagttttaattaacataacctagtctttgcaaaacatctgattacctttgactcatatgttttctggtatataataatgggttctcatgagttgtttattttataagatctcctgtttactcagagtaaggaaaattttttttgaggtaaggtcttgctcaggctggaatgagtggtgcagtctcaactcactgcagcctctacctcctgggctcaagcaatcctcccacctcagcttcccaagtagctgggaccacaggcacatgccaccatgcctgactaattattgtattttttgtagagatggattctcactctgttgcccaggctgatctcgaactcctgggctcaagtgatccttccaccttggcttcccaaagttctgggattacagtcatgaaccaccatgtccaaccaggaaattttggtattaggaagtttcccacataccatttgtctttggtgccatgaacacctattttgtctaatttttataccaacctttcactttggcacatgggaaatctgataaggaatcgatatcacggaaatacacatcacactttctgcttgccgctttcttccaaaataaacccaaggattccccttttccaccaccaccttaatttagataaccaagataaatgagaaggttttcgcacttgatggtgggatttcttatcaaggctattgaatttggtttggcactgactaattttggtatccatgtgtttttagagtaagttgtagctagggtggtggggtgatggggagactctcactgaatggctctaaattcagtattttattctttaaccaagcagctgttcacacacatttcttaggaagtggctaaataaaaatatggcagccctggaatgaacagaaactgttgctctttcaaaaaccagcagctacaaatagtgatttttcttccacaaatacttgtttttctgtgacattctcattggttttattcagttaaactcccagaccatgttgatttttttttgccttttattttttgagctcataggtaaaaggagttgaagtgattttattttctgtttttgtcttttttttttaagtttttgtagagacaggggtcttgctatgttgcccaggctggtcttgaactcccgggcctcaggcaatcctcctgcctcagcctcccaaagtgtacccagtctcaagtttttttcacattatatatttgtgttctttctgtttttaactaatggtctccattatttaggctatattaaaataacaataaaaacagagcagatacaacagaattcatttggttggccattggagctgtttttcctttttctttttaaactgactttatttttttggagcagttttaggttcagagcataattgagaggaaggcacagaaatttcccatgtatttcccccacacaggcacagcctccctcatcatcagcatcccccaccagagtggtatgtttgttacagttgatgagccgacattgacacatcatcacctaaagtccatagtttacactagggttctctcttggtgttgtacatgctgtgggtttggacaaatgtataatgacatgtattcactattatggtgtcatacagaataatttcactgccctaaaaatcctctgtgcttcatctgttcatccctaccatgcccctaaaccctggcaaccactcatccttttactgatttttacagttctgcctcttctgggatatcatgaagctggtggaataatgcagtgtgtagccttttcatagtggcttcttttacttagtaatatgcatttaaggttcctccgtgcctcttcatggcctgatagctcatttctttttagtgctgggataatattccactgtctggaaatgccaccgcttagttagtcattcatctactgaaggacagctgggttttggcaattatgaataaagctgctatgagctttttaaaaaatagtttaaatgacatatcaatactttaatatttaaaatatctcagtgatcatatagcctcagaaagcacagttttctgagctgggtgtcatgttgagtggtgttagagtgccgtgctgcgtgctcaggtgctatgctgtgaggaaggatgataggagcagattctgtataagcagatgcacaaccacccacagctgcactttggcacccagggcagacaaataaaaagggggcaagatttttttaggggagattcctggcagatagagattttcttcagaatgtacagatttatttttggggggtggttaggggcgacagttgttttaagcagagttttgaaggagtttggtttggtgagtgaaacagtatttcatttttgattgcctttgtttttccagcaagaaagctactcctggtctgtgggcacacaccaaaaggctttgggcaagacagagggagcttgtgtgtgcccccagaccggagtcataccacagttgtcagatcactttgcggcagaccttccgacagtctcctcatctctcttgtggaatttgagtttgacccacaggtagcattttttattttggtggtaccctgatgtttataaggaacctcaggacactattagttaggaaggagattgtcccatgcaattcagccttgcaagagcttcctggttgatctagggacaaggtgtctatcactcagccctccaggtcttttcttcctaaagcaggctttggagcaaagcctgaccggtctttgcctatgactgagtttcccagggctgctgtaccaaactactaccagttcaacttaaaacagcagacatttatcctctcacagttttggaggccgcttcaaagtaggtgtcactgaactgaagtcaggatgtccgcagggctgcgctccctccagagcctctaggaacacatctgccccttgcttcctccagcttctgggggctgccagcgggctccagcctctgccgctggggctgccttgcctcctctgctgtgtcagatctccttctgcatctctcttacaaggacacttgtgggccgggcgcggtggctcacgcctgtaatcccaacactttgggaggctgaggcaggtggatcacctgaggtcaggagtttgagaccagcctggccaacatggtgaaaccctgtctctactaaaaatacaaaaattagccgggcgtggtggtacgcacctataattccagctattcgggaggctgaggcaggagaactgcttgaacctgggaggtggaggttgcggtgagctgagatcgtgccactgcactccagcctgggcaatagggcaagactctgtctcaaaaaaagaaaaaaagttaaacgagtgtcttggcactcccctgtaatcccagctacttgggaggctgaggcacgagaattgcttgaacccaggaggtggaggttgcagtgagccgagatcacgccactgcactccaccctatgcaatagagtgagagtctgtctcaaaataaataaataaataaaaataaacaaggacacttgtgactgcatttagggcccagaacaatcccccatctgaggacctttcatttaatcacatctgcaaaggcattttcatgtaaggtaacattgaaaagtttcaggggtcaggacctaataaattttgtgggccagtattcagcctactgtcccctagttacaacaaggatggggcagcttatggacgagagtgtcaaaaaattcagattctgtcctacagggatcatcttaccctgcagctgagttgagtgattattgagaacatactacgtgttgatgctgttgcttagcactgtgggagatacagagatacataaaactctgcttgccctgaggttgcttgtggttttgttggaagagaagacgtgtgtgtaaaattagtcataagaaaaaggtcgtgtttgatcctgagagccagatagtggtacccagcagtgagcatccaagcccttatctcccaaataggagactttgtaggctgaaaactggcccacagatttattaggtcctgacccctggaacttgtcaatgttgccttacatgaaaatgcccctgcagatgtgattaaatgaagggtcccggtatggggggttgtcctggatgagctgagtgggccctaaacgcagtcacaagtgtccttttaagcccctgctgtgcctgttctcttggtaaatatctctgtgtgctggaacatttgaccagagagagatttcggtgatcatatccatatttgactgtttcctattccataatttgtcgctgtctccgagtcttttcccgggagccccctattacaagtgcacctttctgtgtttattcttccctgttgtgcttcgatgatcccttttttctattcttcagtggctttttctccagtaaaatagcagtttaaattcttgaagggaaacaattaaaaaataatgtctctgggttaacaagtatgattaccgtcatctaaatcagtgatactacatgagaataaaatcaaggagacttacatttacagtagatgaatctatgataatatgccctaccgttttgggtaatttaaatttatgctagttcactctgtctacatgcatgtcatatcttagtgtaaattatagaaatatccctataaaagaaaaaataatttttttctgtatatgttttaagggaacctgaatttctttgggttgtaatgcatgatacagatagtattctgggaatacctgatgttcagcttatccctggaaccctggttatcttagtaaaatatgcagcaacaatatagaagacaatcctgaattttccactgcacaattagggcttgattcaccgtatgacttgggcaaattacttaactttttgaaaccacacttttctgattttcaaagtatgactaataatggtttctgccttaggattattaagatgattaaatgaaataatgcatgtgcaacgtttagaacattgctttaaagtttgtcttttccttctctctccccttttttcctttaaaataaacaaacatgtttgagggctgggtgagttgatgggctccctttagtgcagcacttctaagtaatcactgttccctctggttcattccattgagcacatgatgacaaacatttctggggatatcatgtcaccttggatatagaacagtctcctaaattacattttatatgacaatgtctcactgtatttttgtcctcttgaattgcagcatagcatattatttcttccagcaaaaagcaaaattaaataaataagtgattaagttgctggctgtagctgatactgattcatgacatgactgaggattacttagccatcacattgaattgatgacagttgccttctaaatattatctttagtcacatccctcgaatgtttgcagtgactttcactcctcaactagaatatgcacgtttacatacacatgcgataaggctgaagaaggcttgtggctcagcacaatttggtcttgtatgcacagtaatcattctgaagtgtatgattctgttttattagaaattctcacttgaatttcaagagaataaaggaggattcctcctacacaaagctgctaattgtttgcacactgtgtgcatcccgcatgataagcgatttgagaaggtgccacatcagtgcctttatccaagtgtcacctcctgtctacagttcccttagcagggtgaagggagaaagatgcaaagactgagcttggctgaaacaaatgtatttttgtccccttgacttcttgaattgcagcagagcatatgaataacattgatatatttcttggctgctagacaacaacgtatttctttgacagattgacgcctgaaaagaaaaatacagtatgtactaatgaatcaaaacattttttagtacctttgtgtatactaaatgtattttagtttctatctggagctagttgccatttactgtgggtttgaaatgccctaagttatcttctatggatgggtagaatcaatttacccacacattgacagcttttacagataggtcctgtaacagatataattaagttaaatttcataaatagataggcagtctcctccccagtcctggtccctttgggagatgaattggggtgggggtaatggagagtttcaaaaaggctttccggtgtctttttttaaaaataaggttttaagagtttcatggtcagctgttctcagtttttctcaagatggtatccaaagtaaggctcaaatttatgatttatcttccaaatgcttaaatggtccatttatgatctgccagatgttacaatgactagctccccaaggaacgatcaagaatgtgccaatgtctgggcaagatttttatccagcaaaaagaaaaaaaccataagaattggaggttttactttgaaaagtaaaatcagccacatccatgacttaagagactgtacatattgtcatgggtaaggatttagatcttggctccactgcttactcacagtgtaccctggacgagttactaggcctttctgtgttttactatgctcttttgtaacacagggagagatagcatctatcttctaaggttgttgtgaggattaagtgaactaacttgtgcaaagctcttagaatagtgctgggcacagagtggtgagtgccttgtatatgctaatagttgttgatttatagcttaaaattaattgtgtgatgcaaataggagggttaccaccccaagcttaaatggaagttttgcagcactttgcactcttgaggatgtatctgggtttaatagtaccttccatctagtgcacaagtcttctcccaggctcatcctcccaaacacctctcagtgttatccccactttgcaaatgcagtagtagctgggctcacagaagttaaataactacaccaagtcaccatccaaaaaggttcagggccaggaatagagcgaaagacagaatacggagccatgctctttttgctgtctttctcagtgctcagttctcagaattactcaggaatgagagcagagaaactctgtataggccatgcctggagttttttgcacatggcagtcagagagtcccagctcagttcagtgcagtattaccgaattccagtatatgctgggctctgttaggtgcaaggggttccaggatgaatgagtctgtggcccagtggacaaggtttgcccctgtgtgcagctctgtctgctttactagatttgctcctcagattctaaattggaagtatgtgcatattgcttgatttacagattattagagaatttttttcagttaaactttgtccaaaatagacactaagggcaaaggaaactggtattattacagcagggtgtatctcataagctctgagaattgtacatgtataaagaatctttgaatcgccgagtcttagccccacgttttatacagcacagaaatacagcacagaaagtttaggtgatttcccttgggttccatagtgtgttagtcaccaggttcctttaactctctcagtactctttcctttaaactatggaagagctcaaatgattaaatcaataaaagaatgacaacttatagagctcatttacgtgtctgaatatatcagtttagcccagagtatctgaactcctgggccattgctattcactgaccccttctcctcctcgtgttctagtaaaattcagcccatgaatatagtcattagaagttgaattttaatgaaattgggcgctttgatcaatgggaaggttgaaagttatgtgggaatcatctatatagtttatagctgtgactatgtaggccagctcctaagtgccccctgcaatgtgtcactctctctggttttctttccagggaggtaccctgtagaataacagtctaatttacctctcagacatctgctgtctttcagaccttatgctagttttgtgcatatcttcatgattcctctaataatgcattggattataaactattatctccacttgagagacgctcagagaggctagggagcttactcagggtcagagggagtgcagctgaacagttctgccagggtccctgtgattgttggagcagcctgtgttttttcaagctgttgtctgtgaatcgtacggtagaaacatggtgcgtatttctgcagccttagttctagccattgaaatatcatggagttgaatgcagaatacccattaatgtttaggatgaccaagaaactgtgcccaggccccaagcccagctctgtcatcagaggtgagttaccactggtgccatgccctttgattccctacaggcgccctatggaggtgcccaccagtgtgcacttggaagtgtgatggaacgcatcacatccccttgttgcccctgccccggtgatagggggattcactaagaacttcagcatagtgagagaatgtaactgaagctcctgggttagtgctgcttggtatcccagttactttgtagatttcggaatcttttgtcgtctagcctgaggattactgttgatgacacaattttctttgggattataggcttcatgtttcatacaaccagcatatacgtaaatggcctcttcagtgtatcatgtatacacattggtgaatagcttcccactagataatgttttaaaggggaaaaaaagaagtcatttctaaaatcccaagagagtgtccccgttttgaggttagagcacgttttttagccttatttagtcttgcatcttgctccttatgctacctttcattgctttatgaaattattttttaagggatactttctaacattccatcccactttttttaaagctcgttcatatactttgtcctcacagaatagaacagggtttctcaaattgcacacactgaactctgcaacacaacagttccttcattggagaccagatgaattgaaccactggctttctgaaaataactgtatgctttccagttggccagccttggcagggacccactactactcctatttctcaacagtcaatttaaaatattgacagtagcttaataacattcaatagtaacttgcagcagcctttcatataccctgacatctgagatatgtaccagtttatgaaatagaacacgcagatggtcttagccccattttccagatgaggacccttgtccagggaaggattggtgcccatttagctagctctttcccagcaagcaacagtacccaaggctccatgccccaggcctgggaggacccctcccacggcgtacttcagatctccacctgtgactttgaacacatgcttcgaggtgatgtacttcttggagatagtgctttcctcatctcttctaccttgtagtcgtcagtagagggcatgcagtgcaacagaagtggatttcaggactgagactagggtgaggcaagagaggcatcagaatgcaaaagtgaagtagacacctgccgtcagcactgggcagccctgctcctggggccttacttgactcatcctggtgggttttccaaatggcagaggtgcacaaccacttcttgcaagcatgggcacttgaattgtagcccatgtacacagtgattcttggaaaaagtcatgagtaatgaatggaacttttctctcccaggttgatcttgtgttttgagacataaagagtcaaaggttggtgcctaggatgctcattcttattgtttttggtagtttgattgttgaaggcttttgacacgacattgaagtgaatatttggggcattttgctcctctgggcttttctctaaagcaccctcacatttcctctctcatgttcctgggctttcctggctttgatgctagccccactgtgtgttcccattaatagccctatgtagcctggctccttattctggaaactgtgtaacttttgctcttgatcttaaacacaactcagtcttgcaaggagctccgcctttggtctcagcttcttggggatttccctggcagccacatagtgaactatgtcacactctctgttttacccgttaataaggaaatactctggtacatggagctttgcttgctgatctttttctaagtactctgggggcaaaaggaaaagcagctagaggataaggatgtaactttcttcaaattaagccatcctgacccgtggtagagattagccactaagaaatagtggaaacaaataactgtttcactcttgagtgttagcatggaagagattctggttgaaatcctagtcctgccactttctggttacagaaacttacattacttttcttttgatgtttcaaggagataggagttaaagaaaaatgaacaccagattactagaacattcttatagagttgcccaaagatggaatggacaccttccagagtggaggggagggagtaggattggacagtagtcctcaactgggagcacttcttccccctgaccccacacctgcctcccagggacgtttgacagttttggattgcacaaaactgaggggtgagagttgctgctatatctagtgagcagaagccagagatgcttccaaataccttacgaagcataggacagccctcacggaaagaattatctagctccaaatgttaatgatgctgactttgagataccctagtcagaagtaacatttattggccaggggcagtggctcatacctgtaatctcagcactttgggaagccgaggtgggaggatcacttaagcccaggactttgagaccacctggacaagaccctgtctctacaaaaaaaaaaaaaaaaaattagcctgatgtggtagtacatgcctgtagtcttagctactcaggaggctgaagtgggaggattgcttggacccaggagtttgaggctacagtgagctatgtttgtgacactgcacttcagcctgggcaacataacaagactctgtctcaattaaaaaagaaagaaagaacatttgttgaatctaattttcccatgtaatatcaatgactgtgcaagataaagtggtttttatcctcactttggatgagattggcctttggtgattgagaaaccttcctttggttgttcagctacttctagatagacatgggattttaaactagccatctatatgtccaaaacccatccgctttccacaaacccattatgtagttagctccccatcactgatgatgttcaaagctaagcagggtgagcaaccacttgaaagaggggatggatgaggatacaagcctaagatgtatgttgcactaaatgacttttgaggtccctcctaaagatcacattctctggttctattttgaaatgggatttgtctttttagccccagtgttagagtggcagccagatatcccttggctatgaccagtgaaatccctgtgctttgtgcacctgtgaatcttactcctattaatatcccagccctatcaggccagagggctagggttccaaacaggggcagccagaaatgcaccatcttctgcatcccatctgcattccgggcccaggcagttatttttacctccatatgtaaatgggcccagcgatttctcatttaggagaacagcagaggcacaagtgaggagagctggagaaggaggggaacctatcatatactctgagattgcaatttagtatcagtttgctgatcagtgtcactccactagtttaataagtaattatagtttctcttttgtgaacaaggaaaacgggtagcttcacccagtggttgtcagccctggccaaaaattagaataagatagagggcttttaaatcacacctacaactgagcccctccaccagaaatttaattttctgaggtgaggcctgggtacagtgatttgagaactttgcagggattccagtgtctaagcagcctgggcacctctggttaatggcacacctcagtgctgcgcattctgctccagtacctgctggtgttactctgtcataaagagactagaaaaagagtgagttgggccctgtttctcagtgtgtcttcagtggattgtagggagaaggaggcccatactctctgcctaaacgagcacctgctagactccgaaatctagttaatggaagtttctcctcatccttggacatccttgttttatatggtatacgttcaaaatacatataatctttggtttaatttgttttacaaagttttgaagttttcctctccacacttttctcatcaagctggtgtgtggaaagaaggaatttttcttttccattgctgtcatctaaaattgttgtgtcgggtggggaggggagggagccgggagacttagctttaactacttagaagttttcagggaaatgtttttataacaacctagttaatagtttgactttatgatagattctgttccttcattattttgtcctccagtggcttttatacccagcaaagtggaccatggtgtatgattcaagaagggtgaggagtatgtctttctttggaaaggcagggatggagggttgtgatttagaaagggtaagcaggaaaggagagccacagaaggcaagcactgttctcatgccagatcggtttcaaggaagaggacatatggaaggatctagaaaatgatttctctagaattgtccatgtccaagtcccctggaatgtctttgtatatccccagagctgtgcatgctccagtttgaagagctctgctttaaaagatatcaggggtgggggagatgaggggggtgaagtaaaagaataaaaactattcaattccatttgttttctctttcaagctcatacgttactcatttcatttttatattaaaatatagatgaggaaggaagggcacatggcaagatttggcaagcataatccatgaggggatatggagttggggatggcagcatagcatactaggatttttgaggagggattcggggagcctgttcatgttttccttacaactctggtacatgaagtacaggttctgcatcatgatggaagactgcctgggttcatgtttgggccactacctactagctctatgactttgggcaagtttctttcttcttttttttttttgaaatggaattttgctcttgtcacccaggctggagtgcaatggtgcaatctcagctcactgtaacctctgccttttgggttcaagcaattctcctgcctcagcctcccaagtagctgagattacaggcaaccgccaccacgcccggctaatttttgtatttttagtactttagtacagaccgggtttcaccatgttggccaggctgttctcgaactcctgacctcaggtgattcacccacctcagcttcccaaagtgctgggattacaggcgtgagccaccatgcccaggcaagtttcttaacctccttatagcagtgtttggcacatgatagatgagctacaggttggcttgttattccttgcaatcctgagtttctccccagagtaaagctggagcttttcccccagccaactttggtggagtccactgggcagagatgtgatttcagccaaaatatggctaaaggaggaaaggatctgagacagccaggtggaaatggctccccgggagagcctctgaccgacccgcacactgggaggagtgcgcactggggtggagccttgggaagttggagccatttgcagcagggaggagcctggcccctcgtcttcttggatggtacctaggattcagtctgcgaggcaggaagcacactagcaggactccagcttggtggagagttcctgctttcctttttttcctttttgtccaataaatcccatttttctcaccctttaaattgtgagcctaatttttcgtagtcatgtgacaaggacccctcttaagctgaactaaggaaaagtcctgcagcagatctaactagaatgccaatgcctacattgaggctgtttaatggagagtttatgaaaagttagctagtgtccttgtgtaaacctgtatgactctagttcagagtcttcagtaattgcaattcaagaataaaaccacacggcacttccattcccgtgtaatttgttgttgctggcttgtgacattctacatatcccaactatgagacagccaggcagtgggatggactgtgaggttcagatgcccggagatatgtgaggaagagcttttagcaataaatatgaaaatgaaatcaaagtaaaaactggcattgaacccctggtgtacttaggcttacttttacccaaatccaaatcatttcttgacactgcatggttaccaagagtgtctgtcattcaatatttcagattaagatctgttctttggtagctaagttcagagaaaaaaatataggatctagaagtatcattgctattttttccttgatacatttagtctggtattaaaattgcttgcagaagatttgattttaaaaaagtagaaaagagacacttatcctggtaaaattatcctgaaatcttaagaaattaagacaaattgcaccataaaaccagaagcacaaaattaaacaatattatattaagagaacccagtgacacattttccttctaaattaactttaaaattaacttttaaattaagttcaatctcatatcagtttgctttgtaagaaatagaatatatgtacatgtttgccttatttttagcatgttatattcattaaaatgttttagtttattcagcagatacatttagcatttctttcacaagaaagacagtgaaggaacaattaataacaggaccccagtaatacctggggggtttctacatctgcattttttgcaaaaatagaatagccttctaagaagctgtcagtggcatttgtgcagctggacagctttgcagcagatgtaacagtaactgtgatgccaggctgtgccccagaacctgtaagcatgacaagctctggcttcttccctcctctgaaaaggtacaacattgaagaggcagtcgtttcccctagatctgtaaccaagcacatctgggtgaaaggggaagacatctcttcacagagaggagaataaaggcggtgaccatcagggtgacaggcagcatggactgttgccacctgtgctgcaggcagcttcagtgcctggatggtgggacagctggtcctgcactcagcacgagtctcaggcagtggtctggccgcgcctcccttgggctgcttcttcctccaccgtcctccacttttgctttgtgtctgcgtcaagtcagtaacgttggtctgcagctcccatccctcctgatgggcactgcactgaggccttagtgggcattacctgatgccctcatcacccagtgtacaaacacctgctgacaagaagcgtccctgagcggaacccttctgctgggacaccgcaccttccgtgtcctgagtgggctgcaccctcgtggtgctcaactgggtgacttcacgctgtcctcagcgctgtcctcggcgctctctctccagtcagctctcctgctcaggcacctttttgggacacagtccttgccagttattccctgtttaatgtcctcatgtgtcttcacttgccctgggagactgtcgtcttgagagagcaagccatatgggaccctgaggcctggcctcagtttccctcccccccactgccccacggggccacgcctcatcagtggcatggaccttttagtcagcgagccctcagccggatgctcccgtgctggccactcctgtcatccctgctctgtcctccctgcaaactcctccctcaggaccctgcttgaagttacgtcctgcacagtcatccctggccttccctcagcagaatctgtcactccctcaaggtgtccctgcagtattctgctcatgcccctgctacgtggcagaactctgttgtcctatcctgtccagagctccaaagcccccagaccctgtggctgctgagcacttgaaccatggacagtccaggtgaggatgtgcggggagagatgcctcctgcctgtggctgagccctgcctgaaggagctgatgaggaaaagctcctaagcacaacagtgctgctcacctgggcatctagttggcagagtcctatcccagtgttcgcacccccagtttcctgggtcttaagttcagattatcaagtgctcctcctgcaaaaaaaaaaaaaatggtgattcttgtggcccttagttgaccccgcacctgggatatgcttatatttggtgtggggcagagaactgagtgttcttgaaccacttccacccaaccagagggaggtggggacatcaggtacacctcatcccctgatgtcacagccaagtacctggagccaccaggactccctctgagcccacaaaggagtgtcttctcaccaccccgattatactggtctagttatgctttggagttaaagccaggctgctattgcagggctgctgcaatccttgcaagcacagttgttctttgcttgcgcttgctctcgctctcgctctcactctcactcttgctcgctctctttctctctctctgacttcagtttaactttttaaacttcagtaataagtgttcctcaaaatagatggtcttcctggttgtaggtacagccagcagggttgagttctgctgccttccagcatggttttcctggggcctgtaaaagtcctgcaaatttgctctgacactctgttgacatggaggtcctgtttgttgttataaataaggaccagtgtctctaggacacaccttactgtgtataactgaatggcagattttgtcccttacttcttaaaaattaaatggcagaggagctggccatgtaaaagccctgtgtgtgtttaccaaaaagtacttgaattttgtttgggttttgtgttctggtgcatatgaagtgaattttggtaggagtatgtgcattcagagaatatgtcatcacacttttttctttatttgagtgccacttggctcttatttgattaaggtaatttcagtgacatattttgaagcaattcaccttgaaaggcagaggcaccacccaggtgcagaaaccttccttgggttatgcaacgcccagcgtgggtggaaccgcactcacactttacctcttcctgaaccacagccctgctctgattgcatgatggaagctgaggtgcctgacaagtggaaggaggaaaaggaacattctgccttccttttctctgtaatgccaaagctggcgtcatgcattactgagggcctctgtcagcactggggccggccagtggcacagctgatggggtagctgcactcgctagtcctctgggaaagcccaggttgtttttctggcttagtgttagaggcagctgtgatgtttacctcgatctgtaacatacaaagatctgatcatatgctgtctttgcttacattctattattgtctgacttatgttctaaattctctacaattcccttccatttgtcttaagaaactctaaacctttttttttttggaaatcactacttaatgattttgaggatggaaccccagacagttggtaatagtggatggttttccttttctgtagttgagtggctttctaattcttttgatggcacacaaaaagaaattaaccttagatcacaacttagtacacacatttatgtatgcatgtaactgagatgagttcctcaaaatagcacatacctgtgttttatgtgaggcactgatattttctgttctatattatgcttaactttaaaaaatacttcctgtgtaccatttgtgggactgtaactcacaacttaaaaaatattaccttgatacatagctccagaaatacacatgggtcattttaccaagaatcaccagtgcttttgctctgttaccccggctggagtttggtggcacgatcatagctccttgcaccctcaaccccctgggctcccagctgggggtctttaggaccccagcgtgacctgtgggtagcccttacttcctttaatacttttcttctgcacagtcaggtgctctccctttgagcttccgtgtgaagttcactgtgcacccagctctgctaccaccgcctctgtcttgaaaggaatagggtggggtggtcattggtgtatagtaagattcgaatcacatccttcaagtacagttctaccctaaagataagagtccctgtggtttttgttgttgttgttgttgttgttgtttgaatggatgtgttctttgagaaattgagtcttgagtattttgtgaggacatctaagcctggcgtccacgtcagtgctgacagatttgacctagtgtgcactcccatctggggaaatgcccataggctataatctctttcactggagcgattataatagcccccgggcttcaggtcccagtggcatccacccttggtggcagcatacccctctgcatgaacagggcgcccacttgtcccctccttcttacttagtagtgatttttaaatgggagggtggcagtcctgaatgtagttcatcagtatttaccgcacaagctctaaaggacacagtgttttatttgtgtatttatttaacttttccaatatcggaatatgaatttttgtttcacctgataggacacgtttcaggggctccattctacattgtcatttcacaggaaaaatatttgatggctcattagaagggaacatctattattttgttactgaaaggcacattttcaaccttgagaattggatggcaggtaatggcatggaaattgacagcattttaccacttaaaaataaccacaagaaataccaatgttcaccgaatgagttgaagttaatttggttttgtaggctattgtagttaacttgatgcttgatggaaataattttgtattggaaatcattaaaaattgatttgattaatgcttttataatgttggtatgaggtgttgcactgtggtggtgatgacctaagggtgctgtgatggcctcaaacgttgtccctccggggcccacaggcaggatcccacacactagcacacctcccagttcctcttaccatcaaacagaggtgttccttcaacatgcctgctcctccctgtggcataaaggcaccaggaggttctctgatcccctgttagatctcctctgcagggttgaagacattttttgtttgtttgtttgtttgtttttgagatggagtcttgccctgtctcccagactggagtgcaagtgacatgatctcaactcactgcaacctccgcctcccgggttcaagcgattctcctgcctcaacctcccaagtagctgggactacaggcatgagccaccaagcccagctaattttgtgtttttagtagagatgggatttcgccatattggccggggtgatctcgaactcctgacctcaagtgatctgcccgcctcagccttccaaagtgcttagattacaggcgtgagccaccgtacctggccatttttgtttttaatcggtgtagtgtccctaacctaaatatttcacatggcctgaactttctgtagttttagcagcaatgggatgctttgaaacctagatctctcaccaactacatcttccattgactggtgaaacactagtttaagccaattcattttgaccatgtgcatttttgtgcttgatccctattttatttcaaaaataatttccatctctattcatgtaaactaataagagccttccgtttcctttaatggcaaattgtctcatcttttactgttttaaaacatttttttaacatcatgagaaaacgtgataaaaggtataagtgtagtttcctggcttttgcagtacctcagggaattcggtaaactgtattccatttgaggaaaggaacggttggagtaggaggtagtgtaaagataacatagcaaataagcattttaccagaaccctctgaagtctcatcagactgtgccatcatcagaatccctcccttctcatctacaccgtttaaagccagcatccagtcagaagcccagagctggtaccgccttgctttcctgccagttgctgacatatggcacacagtgtcagttaagggcacaggctgatgggcagcttggccacatacctctctggcttcctatctgtaaaatgggcacaatcattgtacctgcctctgaaggttgttgcgagaactagacgcagccttggcacagagcccacagagagtgagcactgtgtaaagactggctgccagccattagtactgggtgcctgtcttttggtgtctgggcaaagctttaacctgttttatcagtttagaactcagatgtctccctggcaaaacaacacgggcatatagatattttgtgaagttttgttgaagtgcacttaggttaatgattcatgggcagcctttcaaagctatcaggctgtgaaacagctttgaataagattgtcttgtccttctgctgattgtcttttccttcccacattagcagccatagcaggaggaggagaggtggcaagtggccacactactctgctcacattaagcagacaatttatggtcaatattcagtgaatttcttttttttatagtacagttaactgatatttatattagctttaaaattatagcaaaatcaggccaggcatggtgactcacacctgtaatcctagcactttgggaggtcgaggagggcagatcgttggaggtcagatgttcgagaccagcctggccaacgtggtgaaaccccatctctgctaaaaatacaaaaattagctgggcgtggtggtgtgtgcctgtagtcccaattactcagtaggctgaggcaggagaatcgctttaacccaggaggcggaggttgcagtgagctgagattgcaccactgtactccagcctgggcgacagagcaagagactctgtctcaaaaaaaaaaaaaaatagtgaaatcagccaaatagagaactaacaggcacactgcctaattccttgtgtaactgtcattggtgtgagtcactggggcagcgtgattaggtctgtgagctggatagcaaggctgtcattattctcaaggccttctgctgactgctgctcttggtaagacatacagaatctgtgggcacctcctcttaccgctctatgctagatgaggcgtctccacgttgagttgtagtagatacagctaagaaagtaaaagaaatgaaaatctcatcaaaaggattggggctagtctcattcttcatgcatacccaaaccgtggtaactttgatttttttattatccagaatggattgtttagaggagacagatggctttccagttcatcaaattttttcaattatctaaaaggaattcctacgcttggagcaagtcatttcaataaatctcattcatatttacctgctgcttccttttaaatggaagaagagaatgtttttcaagtacacttgaaaaatagcatatgtgaattagaaacttcctctgtaaactagcagagtagaaataagaggccaggattcagcaccaggtaggctggattccttcttaggtggctcaagctggctatggggctggtctcatcatatctaaagaactgcccagcttttacgcattttgaatgtggtggaaccagctgcatctttttatatgagagcggcaaatagtcattgtgttccagtttgcttctcgggtcatctaaacatcagaggccatgccacaagcaccgtaactgagggatatagtgtgactgtggtccaggccagtgacctctggagctgaatcatgacttcccagatgactcccagagcctgagaggggactggtgcgtggctccaaatgattttcacctgggcctctttgaagtcgggagagatacgtgcagtatggtagatgtggagagggagaggcatggtgtgtccaaaaattagcaggacctgatccatatacgtggactctgaagcagtgcacttactagattaaaaaaaaaacaatgtacttactggatttaaaaagtgtgtatttttttgtgagatgcagtttgtaagatgcattggtaactaggccatatactttttccattggctctcagctctcaagaagctctttagtttttagcattggatcagtaaacacttattaaaatgttcccagcatttgtttgccatcttctctttcagctgggcccagctgtgccctcaaaccctgcctgtctcttccctgactgatcatgttctcccagcttctacagaggcttccatagcattgtgcttggtagcagacaccagacagaatctcagccagctcagtccaggcgcacgggctcctggtctcccggggtgtggttactcgtgtctcctcggggccttccgccctccacattccagtgccaggccctggacctttgtctctattcatgataaaacatttttaggaaatgctgacgctcagtgaagaaatggaaacactaactctttgttctcttcctaacagacacgagacgacttcctgggccaggtggacgtgccccttagtcaccttccggtaaggacagtctcatgtttgatgcttcgtgctgggggcgggggtttctaattgtttgtagtcagtgtattttcagagtggcatttcttcaccacggtgaagaaggctgaaatgaagcacgtgtgctgtggccttagtcctttctggaaagtggtcctttcaaggggatggaggagaagctggctgtaagagtagtcaagggtgcctgagtcgtgcgcttgcgttcccatccaccagctccctctcttttctgcacttcagctgctccacctttgtgtatcacatcttacaaaacagacacctccttcactcaggcctcccttcttgtcacttactgtctctgcttcctaatgcatcctccgggtcccatcagatgtttgcactctttgtctggaaccgcacatgccatttctcttggattcctgtacacaaactataatagcatttcccagattttggtgtctggctttctcagtcagcatggtgacaaaagaagagcctgttcattctgagtgaacttgtcagctgggaacacccaccctcgctggaacacgcactgagttagcatgtgtggtgctgccatttctctctgctcaaagtagcggagcagtcgaggctgttgactagtgacgggcattagggctgacacccgaaacaggaggcagggcagacagaatgtgtaggtaggacctggaggccttgagaaaggtggatccccatctcctattccagcttcagttttccggcttgtcccagccttcctcctggccttcttccctgggcagcacaacgacgtgatagaagtagcagctgagagaggaaaggcgaatgtttctgccttacaagggcattgtgttatttttttaaatgctttgtgtgagcaaatagcataaatagtctataaagtaaagtgactttactttatttactttatttaaagctatttaaagctagcataagcttcctgctgtgtggaaattatggctgtttccatatgttaaataccaagtaagctttgaagatgtgttgtgaaggaaggtgatagcaagtaatttactcttactcactcaggggagctgttaaggaagaaagtcgcaaggttccaaaggactggaagtgaaagtgatattcttaaaatatcttgtttgtttctttttaaaactctgaagctccagggtgccacgggaggggcctgcccagggcttctgcgtgagaactactccatgagccatcagaaacctgactgctcttctcaggtcacgttgggaggatgtgactatttcaccttttgtgagcaaagacctcgcatccttctacgttgggaggtcttctgtgtatgttcttcagactgaagctgcgatcctctcacacttttagacagtgttggttgatgggccagctcttttatggacgtctccagccaccctttccctaatgtaaaaaccacatcttggccaggggaaattattttctgagaggcaaatattctaatatttggtaagaggcaaaagtgacatgtttaaaaaccttgctctgacaagctcttttttgagtgagtgagcagcacctggtcttgaaaggttgagtagggctcccagaaaatagaaaaaggttcctcctccgaggccaagtcagtataaagaatagtttagctttggattctgagtggaggcagggtcagtgagccttcaaagaaggaagcggtgcagaggcacagggcaggaatagaagccagccgattgcagagggtagagccgtgaacgcccagagaggaccgagtgcccctagttactcgtgtgcccagagggtaacttgcagtggcgtgcttcacctccatacttcaaactgactagctgttcacagccaactatagtcagagagatggaccacaaagaaaacaaaaggagaggcgtgaaggtatattctttattcatgtggcagtagaacccaagttgcgtgttctgaatgcacgtggcttttgaatccaggatttcaggtgctttcgtgtgtatgtttggtcgtgtgtataggatgctcatggggaaattacagtggcattctgtttgtgtgatagcacacaggtatgagtgtggagagggcgggagcatatgcgtgtattttgtggatcgaattatggatgctgtgttcttgattagtatatgaccattgtcaaggtggattattaacagtctgtagattcaaaatttgtcaaaaccaccaagctttagataaaaggaaatagaccaggcacagtggctcatgcctgtaaccccagcacttttggaggccgaggcaggaggatcgcttgagtccaggagttaaagaccagccttggcaacatggcaagaccctgtctctatagagaaacttaaagattaacccagcatggtggcacatgcctgttgcctcaactgtttagaaggctgaggtgggaggatcgcttgagcatgggaggtcattactacgctgagccgtggttgtaccactgcgctccagccttggagacagagcaagctctccttttgcttttacattcagagaccaagagcaaacttagctgtaactgtaccatcattgacttttcaactgccgttttcacatttgtctgttaaattcagtgcatcgttgtctaaaaattcatatgatatttgataacttgaatctattaattatttagcgataaagagaactctgagatctgtattaacagagtgagatttctggcaggtgtctgcctgttgcaccttcctcttgacttgtcagctctgtctccccttcccctggagccctcagtaacccacctttgcccagccacaaaatctcttcgtccctgggaaaggcagtggggcagagagagctattttaaaacattaagttttcctaaatcccagtcatgtgccacttaagacaaccatggctgactctggaatttaaattttcctagatgaggcattttcagggtggtggtattatttgatgccctgcctgtacttggaggtagctcagctgaccaacatccttttaccccttttgtgtttatggctgatggctggtagcaggtagcaggctgatggttccctctcatgagtgcagaattcaaaatcatggagtttggagggacttcagagacactgattcactcccagtattttccaggtgaaaaagcctgggcccagagagggaggggacttgcccagcaataagcaggtcattggtggtgctggatctgaccctggctctccagcatcattgtgagcctgtgatgtggtcaagggtgtgggcatggggtggattcgcccaaggcttaggtgcttgcagtggttgcatacaagtttcgagtctagggacccagcagggccctctccttccatttgcctgcagaatcctttatctcactctattccatagtgaatgcacctaggctgaaagcaactactctctttcaagatgaaagtactgagtatccagattttcttctgaatgcttttaccctggaacgggggcagcattgtggctattgtggctaatagcactgtttgcagcagtgtgtttaagatggctttccaccaggagcaccctcaaagccatcctgggaggctccactcagctctgctccagggaacaggatcagattggaacctggatgaatgccaagaagaatcttgtagttatctataagatcatcttctaattcaggctagagaatttcaatgaacgtgaactttgattttaatgccctacctgttactgcttggcattgagttggcagtactgacaaatgatatgaacgtgtagaattggccaatgaacatggctagtgtttgttgagtgtgccaggtgcccttgagaactttatagaaaccaactcagttgattggtttgatcctcacaacagccctgtaagttatggttactgccccattttatagatgaggacactgaggccaagagagataaggaacttgcccttagccacttggctctgtaagtaacaaagccaggatgcaaacctaggagatctgccttttgacctgtgtgatatcagtcatttaagctgcatagggtatggacagactcaggttcagagtccctctaagctccgtggttttccctcttcactctcttgcatgttctctgctgctcctagattgctcatgcccactggtgatcctgtaggctttgtcatactgtttgatttcctatgtttaaactgtcctttctccctgttctctacctctcaaagccttcccatcaccctgtattgtattgaactccacatccaaaaccattttgatttccaagtcagagtccgtctgttccctgtaccccaagtctcacagaatgtaacctctctgtgtcagtgaatttgttctgccttagcttctagtggattgttgacatgatggctcttcccttgtaattgtaaccataaggactgctataccatgttgtatccacatgtcgttgacataatattgctctcaaattatttgttggttggcagggcatggtggcttatacctgtaatcccagcactttgggaggccaaggcaggaggacgtcttgagctcaggagtttgagaccagcctgggcaacataggaagacccccatgtctataaaaaataaaaatattagccaggcatagtggcacacacctgtggtcccagctacttgggaggctgaggtgggaggatcacttgagcccaggaagttgaggctgcagtgagctatgattgtgcccctatactccagcctggacagcagaagaccctgtctctaaattaaataaataaatgttggtttaataaatgaaaaaaggaaggaaaaccagcaatagttttcttaataaattatccatttatttccttatatatatttacaaaccttttggtagaaaatattttcaaaatgtatgtttattactgcctcataagaacagtctagaaaatataatttacttcattcaatgatagtgaattttgagagcctccatagtttactacagatcagatgaattgagtgcttacgtgagtacctacttggtgccaggcaatgttcttggcaccggtgatccaatggtgagcaaattcaagtctctgttctcatgggcttacattctggaagtgatggataataaactagtatgtcaacaaatgaacaggtactttcagaaagtgatatgaggaagatacagcaggacgataggatggggggtgataagggtggctgatggtgggaactctaaaggatgagacctgggatctcacacttggatggcaaagtggaaacagccatgccatccagagtcagctgtccagcagagggacctgcctgtgcatgggccctactgcagtacatataatctgcatccatggcagatgaggacaggatggttgggagtacaaggaaggaagagagagactggttcccaatgaggttaaagttgattcaaggccagattatagttggtcttctaagtcataggaaagaattttcagtttattatgagaggagtaggaacccattgagagtttaaagcagagaatgacataaacagataacatttcaaatagcagtgcatacgtacatacatgtgtgtgcatgcacgcgcacacaaacctgatacagtaaatcactggactggtttatctcttgctataaaagtatttgaaattgtgtttaattgaagggtctaggtatttgaggttttactgaatatatagtatttaaagattaatgaaatagtcacacttatttatccaatttcctgctttggtaggaacttcacaatgaacttcacacaatcaaatgaacactgatttctttaaaaatgaacaaatactccacttgtactcatagcttcatgaactgaacctcagcagaaggttgatcggtgctgcttcctggggtgatctctgtgcaggagatagtctttcaattctcttaggctgatgttgtgagattttaatacaaaaaacaaagtttccctcaaagattaaatcttgtatattcttctgtttactccacccatatgtgtctcgagtcacaggcatatagcaaggcactggtgaccgctggttctccgaagtgaatcagctctgtgagactgaggccacaccctgcagttagaaattttacttggcaatgacagctgtaattttgtcatttgtctgtggctggggctggctcctaaaacccggtgtggatagtgacatctagtggatctctagtagatcagttccgtggactgtcaggtaccaagtgaagaaacacattcagcggtgccacattctaaaattcaaaatatattctctgtaatccagttgcctgtatctaaaacatgaaattattaggaatattaaaatttaatttactgttttttccccacagacagaagatccaaccatggagcgaccctatacatttaaggactttctcctcagaccaagaaggtgaggcttgtgggtatgggtgggtggggatgcctgccctgcatgctgtaggtataggtggggatgcctgccctgcgtgctgtggatatgggtgggtggggatgtctgccttgcttgctgtggtgtgggtgggtggggatgcctgccctgcatgctgtggggatgcctgccctgcgtgctgtgggtataggtggggatgcctgccttgcgtgctgtggatatgggtgggtggggatgcctgccttgcatgctgtgggtgtaggtggggatgcctgccttgcgtgctgtggatatgggtgggtggggaggcctgccttgcatgctgtgggtataggtggggatgcctgccttgcgtgctgtggatatgggtgggtggggatgcctgccctgcgtgccgtgggtgtgggtgggtggggatgcctgccctgcatgctgtgggtatgggtgggtggggatgcctgccctgcgtgccgtgggtgtgggtgggtggggatgcctgccctgcgtgctgtgggtataggtggggatgcctgccctgtgtgctgtgggtatgggtgggtggggatgcctgccctgtgtgctgtgggtatgggtgggtggggatgcctgccctgtgtgctgtgggtatgggtgggtggggatgcctgccctgcgtgctgtggtggttggcttttgctgaagacgattttaagtgtcctttgaagtcacaacccttctaaccaattttcttccattatgtgtgcagtcataagtctcgagttaagggatttttgcgattgaaaatggcctatatgccaaaaaatggaggtcaagatgaagaaaacagtgaccagagggatgacatggaggtacgtggagggcgtcaggcctctctccttgccttgagatcatattcatgttttgctttcaaactttataattgaaggaaataaaagtttagaaagcttaaatataaaaaaaagtacatatgtccgcaaattggtcattgatagtctaccagtgcagttatttgttttggttaaagatgaactttttatgttacaacaccaatcctcggagagatttctctttagacaatgccatgcctattccccaattttagccccacagctctgtgaaagtctcctcacacattgaatcctattattgctatggacttgcaactctttgtaaattctttttagccattgaggtcgcttcaaagtgggtggaggaatttagaaaatcacttttttttcaagtttcttactcatttggccacaggtgacagcctgcagtagaaaaaccctcctctagaaatgccattctgcaacgagctgaccagaggaatgtcccttttttccttcctgacagagccgcctgtatttaccttgtcacagactgatgctgtgggtcctatcgtaccttttcagcacacacctcggccagtgctgttttgttaggcaaattctcatattctcaaagtgtccattaaacgagacctctctagggcttattctcacatctgtttgcagctgttgcatatatgtgatatgtgaataatgtgtgtggagaagttacccgaacactcctccgcctgagagatcatatttccaggcattatttcatttacaagccttcatctctctatatacatgaagaggaataatgtgggtgatagaaatttatgaatgttaacatttcataagcatgtcaacagattttcatctcaaatccaaggaattttttacactcttcttgccttccaaccgcagtaaccagtgaattacttaattttccagtgattttagcagaggatgttaggaagggaatacgtaatgcctaaaatacgtgctgtaaaaatggaactcgaattttggtaccatgaaacccgttggtgtggacacagccagtgtagagggcctgagtagaaggcagcagcttccagactcctggctcctgcggttgtttgggatgcaaagaggaggcttctctctcaaagcccacctccctggggagcaacaggactctgggcctctggtcccctgtgccatgagttctgttagaacacaggtgcagcgcagctcatcttccctgctccctttacctcatagaggtgttgaaaagatggcagctgtactgtgacgcacatcattggcagggctttgtacagccttggaggccctccagtcaaaataacaaacatgacgtatggaaagagtatgatgtgacttaagtagtgtcaccgactgtgcagatccaaattgtgttgtcctgcaatgtagtcatcttagagggcagcacaattaattggccattactcagaagatttttgaggcctttctagaattgatatatatatatttttttggccttcatttgggaatttactcaaatgtggccccgaagccatggctagagccagagagccccagagcaaggagaagggcatgcagggcatgctgtgatgacctcttactcacagccgaagaaccaacctcataatcgtccctttaactttattccgcagcatggatgggaagttgttgactcaaatgactcggcttctcagcaccaagaggaacttcctcctcctcctctgcctcccgggtgggaagaaaaagtggacaatttaggccgaacttactatgtcaaccacaacaaccggaccactcagtggcacagaccaagcctgatgtgagtaccgtgtgatggtcaggaacacgtgcacgtgcactgcacagctagggacaaatatggcggccctttgggacaaggctgggaaataaatcatatgtctataagagcagatggtggtgtggtacgagattcctctccatttacgtaaagcatgcaagagcagtcagaacttgtatattgtaagcgattgcctttgagtcacatgctgctgttttcaatatgagctgatttattttctatgtcttcttttatgtcgattcctgaaatacaaagcagaggttgtttttcttagacttattttacatttgttgattatattgttttcttcttcacctttctctcccaactgacccagaacagaaccggcaagcaaattggctttgcaattttctgttttctctaagtttttggatgtttactctcttcaatgcattgatttggaaacctcaaaaatttttttttctttaaggaaatttgagccccttaatataatcagaaacacatgggagagttgcaaaatcagaattagtaattactgtgtattttaatccctcaccagcctcagggatgcagtaaaccaattcctgttttgttccctcagcaatttgtggtttgattgatagcaaataaacactggttaaaactcatggactttaaaaatggttttgtagcagcttgtttttaaatcattttatacagcaagatctaagtctattgataatacatcgaagggcaaaaagaaagtcttaaggaaaaggaattttatcctagaaattatgagctgcctagcagccaagacaaggaggaaattatcaatgaactatacaactttcagtatgtaataaaagcaagtctactgggtagtataattttcttgtctactcgaactctgaaagaaagtggctaatgatacattttagacaacaagcagtatgaggtatcatgttcttaaaaaccttttatctttagaaattgtaaagatactccacatatgactgtgggtggggagggtggccaagttttctggtctaggttttgtttaatttagagataaagcttgcagaatctggaacaacgaatagcctgtcttctctgagcccccaggtgggttctcgtgaatgtcagctgttcgtgatcagctttagactacccagcacgggcattagctcaggacagcaaaatggtctcaggacagcaaaaatatcagatcagctgggtaatgctgaactatcttttgttaaagttttttcccatggaaatagcttggttgattctttttgttttttatattattgcttactatttccttttgattaatgcccatagctattagaattattgtaatccattgtagctatttgtagtaaaaatgaatttggacccaccttgggcttggttacatgtagtgactagaagaatcttggtagcaatatcctaagcaaagcaccattacctacctttgctcaacagcatgagaaaggagtactgaaaaggtagatcctcatgcgacctctgcagaaaagtggccaggagcaactcacaaaggaaaaaatcctgatagctaatatgtatatggaaaaatattcaacttcataaataaggatcatgcagattagagtttgtattttggggacaaatagggataattgctactttctctgcctcacagagttgtgaaactaacgagggaattcttgagaaaacacttcatacattttaaaatatatactatttttttgatggctccacaggtgtagacatgtccccacactcatcaagaggtgtacgttaaacatgaacagctttttaatgtgttgattagacctcaataaagtgatttaaaagagaaaccatctttggtggcagtgtcccagaaactaaaacaaaaggtataacttgctggctcttcactagtctagagcaacaagggaaaaatgcagttctttttctgttgttgtttgagacagagtctcactctgtcacccacagtggcaccatctcggctcactgcaacctccgcctcccaggttcaagcgattctcctgccttggcctcctgagtagctgggattacaggcgcccgccgccatgcccagctaatgtttgtatttttgtgaagatggggtttcactggcttggtcaagctggtttcaaactcctgacctcaggtgatccgcccacctcagcctcccaaagtgctaggattacaggtatgacccaccacgcccggctgaaaaatgcagttcttaatccaagttcgggctcacatgtagttttgggagaaggcagaggcataactgccccatcaaggaggcagcaatgccaaagggagaggctgagccaggaaggacacagcagaacttggcagaacctgaggagcgcctccttccaatgggcataacttctagaaggcaagaggaaagttagttaaggaaaaagagtttccaccacaacctctgctagcaggccctttattgggatacagtataagttcatttcagaatgtgtgagaaaactttaaaatttgtgttttagaaagagtctataatgagtgttcttgataagtactatatttcagttagtctgaaatgacgatttcaacttttgagatactgacttgtgacataatttttgttaatgggatatgttatcttattgaaagtatctgtgagagttttccctgaaaaaatttttggcatttaaacttgtacactaaaagcctctgactagtatttcccccaaagtatgattgcctataatttactgcaaaaaaaaaagttttcttttttctttttttttttgttttgttttgttttgagatggagtctcactctgctgccctggctagagtacagtgacatgatctctcagctcactgcaacctctgcctcctgggctcaagtgattctcctgcctcagcctcctgagtagctgggactacaggcacgcatcaccacactcggctaatttttgtgtttttagtagaggcggggttttgccatgttggccaggtacgtcttgagctcctgacctcaagtgatccgcccgccttggcctcccaaagtgctgggattacaggcatgagccaccatgcccagcccaaaaaagtcttccaaattgaatcaaaacttttagatcctgaattgagaacatcacatgacaaaaaatagggtatgatgttttggtgttcttcagaccccggctgacttgagaggttatctcctgatgttattaggatttttaaagtagggtaaaggaggtaaatgcagtgtcacgattttgagattctgttaaaatgagctagaaagcagctgaaaaaaattcatgttggatcaggtgtactttcctccagatgacagctttgaatttgtcccttttgtagtctttggtcaaattgctggtgaccagaagtagctgccttgtcattgctggacttctagaaggattgggactgcccagctgctgtgtgaacttgcctgtcacctctgcttccagaggtctgacttgtcactgtggcaaatgggcagaggactttgatttctgttttttattaaacactgaggtatattttgaaatgtatgcctgaaagatgctcaaaatggtgtgactaatgcattttaaaactgcatttatttgattgaaatgaaccttaacctatactttagccgtaatatggtgggagaattctcacattggatgaccagctagttgtcagtgtttgacgctgacactttagtggccatctggccctccgtgagcattgaactgtcatgaagggcccgatctcaaccacttctcttcttctctttccccctttcctgcatgctcagggacgtgtcctcggagtcggacaataacatcagacagatcaaccaggaggcagcacaccggcgcttccgctcccgcaggcacatcagcgaagacttggagcccgagccctcggagggcggggatgtccccgaggtacgatgtccccagaatggtgcaaagcccggcagctccttcttcccatgttctccagcttgattttatatcataatttcttctgtcagtaaacattgttgagaatgtaaagattacagtgacgcagggaattaattaccatctgaatattaatttgaaagtgcctataaaagccgtatttgacaagtataggtggctctatattatagaaatgggaataacattatttttatttttattttttttgaagacagtgtcttgctctgtcgcccaggctagagtgcagtggtgcagtcttggctcactgcaacctccgcctcctgggttcgagcaattctcctgcctcagcctcctgagtagctgggattacaggcacgcatcaccacacccggccagtttttgtatttttagtagaaatggggtttcaccatgttggctaggatggtctcaatctcctgacctcgagatccgcctgctgcctcagcctcctaaagtgctggggttataggtgcatgccatcacaatggctaattttttttttttttttttttcctagtagagacgggtttcaccatgttggccaggctggtcttgaactcttgacctcatgatccacctgccttggcctcccaaagtgcttagattacaggcgtgagccactgtgtccagcccacattatttttcagtatgaaaatcttaagatatttttagtttgtaatttatttttcacaggggtctaaccatgtctcattaaatgacagcttgtttttatcatagttgagctgttgaatgagccctgtaacttgtttgggtatcatatgcatatttttattgagtcgctttgacacttggaagagatttattaccatgaaaatataaatttaggtgaacagaaatgtgtaattttccctttaaatagttatggtatgttacttaaaacgttatgaattaaacaacaaattagccataatcttccatgctatcttaccagctctgtttatgtactaaaaatccattcttcttagacattgtgttaggaagatcatttagaatgcggcgattcaacttggaaaagcaaaagtaatgattccataacacattcactctaagttattttataccattgtttaattacagcgtatagcttctatgctgctcccacggtgaatcctcagtggttaaaagtaaaagaaaatccatgacaattgtttataaactccagagaagtgtgtgtgtgtgtttgtttttttgcccacacatatagtaacaagtgctggaaatcagtcactgttcagagaggcattgttataaagtggttaagagcacagcctctgtctggaaccaggcctctttgattcacatcatggccctaccacttgctagatgttaccttgggcaggttattttctgtgcctcagtttcctcatctgttaattgggggagttatcttcctcgtgattattgtgaaggttgtgtgcctcatgagaggcacttagtaggtgttaattatagttatcaccggggctattgttgttacatggtttcattggggagctgggtggatccctacttctttctagtgtttaccccagtgtctccttctctgaaagccttgggagaccatttcagaggaagtgaatatcgctggagactctctcggtctggctctgcccccaccaccggcctccccaggatctcggaccagccctcaggagctgtcagaggaactaagcagaaggcttcagatcactccagactccaatggggaacagttcagctctttgattgtaagtagtggccttgtttgaaagaaaagctgagcaatgttttattgttttttgttgcttaaggagaatctcttacgtaaatagtgaccaagggtcttccagctcccagctaactctgacattttccaaagttcctccttccctaggagaagcaggactgtactaaaattagcccaagcaggtgagaatctttcttgatttggaaggcagctttgctcacccttataccactaacactttcttggtttataaagaactcaaagaagtaaaactccatgatgtctgtaattattagctttaaccttgtagaattcctttcccagccaaaaggctcatgaaaatagtacctttatcacaaaggtagtatttcacagtaacaattaaaagccatcaggcctaatcagtcctcttaagtcatattctgcaggatttatcattctcatttcgctgataagggcacaatgcttaagtggctcatccaagacaaggtttgagtgggagatagaagacgtctcctaagtcccagagtatgaacccttgagaaatgttgtgaaattgtgacactgtcatcaaggtagcattttaacttgggctctcaaccatcagaaacatactttctagaagcttcagatgggcccaatgcctgagcccaatggaatcagtcacaaagacttccatgtttgacaatacaaaactgtgcagaaataacccatagaaaatccctgcttgtgcatagaattaagagcaaatgaagtctcagtgtttctcaagaaactgaacttaaaaatgtacaatagtaaatgatgatagtcactccactgaaaatggcatcctaaaaaaaaatagtcattactatgaccataacaaacataaatgatagcactgcatacaatgtaaaagcaagtaagtactcacaaaattgttactttttggttatggtgtttttattttaaaagacagtatacgcctctattacatgagttgcatttatcattcagttaatgtgatttcactttgaaattctgtgactttttcaaaaagagatgtgtcgccaagatgaaaatgtagtactaaatggacaggataaaagaaattgcatatatatgggatatttgaactgataaaactgttgttatagaaacaacataaacaatgaagccttgtatttaaaacctataaaagcaaggaggtaccacagaatccatggcagtaacacacctttagtaaaccaagtaaacactgtaatttttttcagcaataatcataagttagcaattctaattatttaaatgaggagctcctgaatttaattattctagatctgtgaaatatcattaagacccaaatacaatgttgtattatttcacatcgtgttcactgttaaatgagagtcaaatcggatatttgctcattgggattaccctgtattcaaggggaagaacatgagctttggctgggcacggtggctaatgcttataatcccagcactttgagaggctgaagcaggcggatcacctgaggtcaggagttcaagaccagcctggccaacatggtgaaaccccgtctctactaaaaatgcaaaacttagccgggtgtggtggggtgcacctgtagttccagttactcaggaggccaaggcccaaaaatttcttgaacccaggaggcagaggttgcagtgagccacgattgcgccactgcactccagcctgagcaacagagtgacacttttattaaagactgattctttcacagtaaccaatgtgggaagatgtgaattgtcccccatccctaccacagagtcttcttgtaccatttacttatcacaaaatattaaaaatgagtaaatactagaaactgatactatggatgaacttgccgataaggagactctggcttctgtgtgtgacctgctgctaatcttcattcatatcaattaggcttcatttaaccacatagactaatacaaacaagttagaggaatattaagacactacacagtagatctttttttttagcttgatctcactatttttaatcattcctgtctttactacttgaagtccacttagaagctaaaattggctgagcatggaggctcacacctgtaatcccagtactttgggaggccgaggtgggtgaatcatctgaggtcaggaggtcgagaccagcctgaccaatatggtgaaaccccatctctactaaaaatacaaaaaattagccaagtgtggtggggggggcttgtagtcccagctactcaggaggctgagacaggagaatcactggaacctgggaggcagaggttgcagtgaactgagatcatgccactgcactccagcctgagcaatagaacaagactctatatttaaaaaaaaaaaaaaaaagcagctaaaattataaataccagatctttcagaagtaggccaagatgatgtctgagctcctctgaatataggatgcaactgactctttttcaattgtagtaatcaataaatgttgggtagccacatatcactatttcttccgtctattcacatcacattaaaatttaccctgagggtgcatcttagagcaaactacaagactgctagcttctttctgtttgtaaagcagcattagagtgttgcagagtcctgttgagtctcctttctgaaagttttggtctcctcttacttttgccactaattctaaggaccaatcaaaattccagtctgcttaactgaaaattaaagtgaaagataactttttcaaggatgactgtccttgctctgaaaagatgtttcatttaattaccttctaatatcgaagagcggtgaatatggttgagtgatatgtttgttaaaccaatgaaagttgcttttaagaatatatttcttgatgcttcctgtcttttcctctccttccagcaaagagaaccctcctcaaggttgaggtcatgcagtgtcaccgacgcagttgcagaacagggccatctaccaccggtaacccatgctaatttccagtcatcagttgactttttgggctttcatttacaatcatctgggctgctgcaaaaagagtttttcctgtgtaaatttatttacaatataaatgagatgtttttaaatttcctggccaattgccctaggaaagtggatttccaatacagagaattgttactgccacccatctctaaaatgctggaacctccattgctttagtttttcacccaaatttataccaattttgatttgctcacttaaacctcttggtacattagttagtaattccttttaccttattgagttactatagttatgctccagtgatctgtactttgaaaacacattgagtccctttaaccaggaagaactcttctgggcgaccgtccacatgttcctttcccttcctaatgacctgaagtctgaactctacagagcctctgtaccttctctttaaaggcagctctgctcaccaggaattggctataattctttccaactctctcatcattttaatagctatcagcaaatgtagaggtgtaggggattttgtaacatctgatgtatgtaaaaagaaatattcaagttggaaggcagactagaactgccctgagagatgtttgatgtacacattaaaaataagaaattttacataaatttgtttcttcttttggaggtgaaaatatgtggttttaatgtgttcaatttgatattttaccttgacagtttttgtctgttgctacaaaaccttgatcatttttaagactaataatgtattacgtatgaatttgaagggggaaaagtgcatttaaggtttttgaaatcacagtgtcttccctctcatgtatgttttttcttgacttcaaaggatattttggcctaggttttaattttttatgtttgagaaaaaattaatgagtatactagtcaaggaagcagtcaaaataatagagtcatttgtgacttacactggagagacttaataataagcttgataagagcgtcttttctgggatggtttcagtacagggctcccaaaaacaaaataatcaactgagatggactggtaggatccttctcaacctcatgatctgtgattttccttgaacgaatggcactttctctccttttcaaaatcaatgtcaattttatttcccaaagaactcactttcctggaaactggtgattcctccctctttctttgtactttctgatgctgtaaactcactgatcaccagtggcctcttgagttttgagtgtggggagatttcagaatctgctaattatttgacaatggcaggcaaaaccagaccagctttccatttttctctaaggcagctcactcttttgaggttgtcattgtttacccaggtcaaggatgagccaccttggggggcataggggtcacgcttcctttgtgctactggtcatcagcgactgctggctttgtctggatagggtgggtttcagggattctgatctcacgtcacctgccttacagcgctgccacagcagtgggccctgattcagacagcagggggtcatcccctaagtgcatttcactgatgtaaattatcattcacagcccagtgccccagctgggagagcgcgttcatcaactgtcacgggtggtgaggaaccaacggtaatgatccactttatcagacatcaatagcaagaggccgtgaggcagttttaatatttcgtgtagtggtgaatatacgctgtttttaaaaataagattagctcctttgtgctacagagctgcacacgtttcttattttaagcttctcatttggggattgtttaaaggtactgggtaaaatagaatgatttttttagtcccacataattttattaggaatactatcaggctttggttaagtgcatttaacttgaccatttagaagatatttttgacttttagtgtttgtactcctgataagtttttccatttcattagaatgcttggttaaagtaatttggttggaagatcatcaaagaagccacaggaattgcatgagactgtgtgtgtgattcctggatgtgcccagggcccttctcttttctgtatctcccctaccacatttttcacagggggttagacttttcttgtccccagaatgcaccatgaccctttctctgccaccaggggctctcctcacacaatgaacaagtttccgtaattccaagggaacataattaggatatataagtgatctagaaaaatttatgtttctctaagccaaccattcttattcattattttaaagaatgtatggtattcctgtctgtgggtgacttagatttgtattttaattgcctgttttctacttgatccctaaagttaggctagcttatagtttatgcttcgcactgcaatagctgtttaaagaatttcctggccgggcacggtggctcacgcctgtaatcccagcaccttgggaggctgaggcaggtggatcatgaggtcaggagatcgagaccatcctggctaacacagtgaaaccccgtctctactaaaagtacaaaaaattagccgggcgtggtggtgagcacctgtagtcccagctactcgggaggctgaggcaggagaatggcgtgaacccgggaggcagaggttgtggtgagctgagatcgcaccactgctctccaccctgggcgacagagcgagactccatctcaaaaaaaaaaaaagaatttccttattgtttcacctgtgttgtattttgctataactgctcattacttgtggataactttacgtatacaattgctgattttctaaagatgttgatgacttcaatttaatgctcagcattgtacagaggaaaatcaaactggcaacagtcagccccagaacactcagctcaggttaagatattgagctacagtggtttacatgagtcatgtgttgagtgaggcagcctccagtagaattcaagaaattctacatgaactattacccaccgtgcacttgtaatttctgtgggagtagtggagctttgagggggacaagatcgttttgtgagataattttagttgaattcagtgctgatgaacatcatctgtatatcacctatttttgtattttgttggccttgcaacctgcgtgtagctttggagtgttgtggtagctgatgtagtaaatgaagtaggaatggaatcattgcagtaccaggctccatggcaagggtcacctggcaggacaaggtgacccctctgaatgagatcccgggtggcacgttagactgccattttcttgccttcttgcctgcactctcccctccccgtcactgagtttcagcatgggttgggtgttttctttccacaggcttggcaatattcattcctaagtgtttcatctactttggtagatgtagatagatctccctacctacttaggtttgaaaggatcacatccatttctcttctgctgtatcctgcatgtttctcttccacatcctttgtcgtgaatgcccttgacttcctgtcttgcaattctgtctcttcaccccgtgtttccctctttggcatcccctctgttcctctgcacatcactcacactgaagtgtattgtcctgggctggagccatcatggtattatatcatctcactgcccctgtgctctcacagacatacggctgtgtacacataggtacacattgtgccactttattttattttttttaaatgggatgtcatgtatacattacttagcaacttggtttttttttaacttatgttcattcttctgggacatgttaataattacataatattcactgacgtaaaggcactacagtgttaatttcccgacattcaaggactttctgctccccctaccctgccctttcaactccatacgctgtgctgaagtaaccgtcctgatatagctttctttctatgatagtgctttcattcctgtagtctaataaacaggccctgattctcagccaagaaaccacagccctttgatttatggcaaataaacgcacagtggtgtcactttctggcagactaagccagggccctccccatgagataaaaggagagggatagcacagtcctttcagtctttgttgtatatattctaaaaatacacgagccaccattactgggttggtgcaagtcttggcaaatctgtgatggtcagtgtcaaagtggttatttttaaaagcatattgaaacttctgcagtttacaatcgtgttctttattttaatgaaagaaacagagccactaggaagttctagctaatggcttttgggcatcacaaagcagtagtgtattcagtctatgatgaaaagctgtgaaatgttaaactaagtcgccatttctaactggtttgattacttttttgttaagctagggtggaacatgctcacaagcacagaacagcagaaggctggttttggcttcctggcgggcccttccatggcctgtctgtagaagctgagtcctgccccctcaactagccgtgcagggtgggaggcagtgtgagttacaaatggaatcatcagcacaagttgttctatgtggtcatttggagagaacactgtaaagaaacatttccaaattgccctctcacataaatgtaactaaattacaggttgccagttcagttctcaatagaagagagaatgagcattttaatcaaattcagcgttctgtactacactcctaattttccacaaactgattagtgctattcactgtggctgtatgaaagtaacctgtatggccaggtgcagtggctcacactggtaatcccagcactttgggaggctgaagcgggtggatcaattgaagtcagcagttcgagaccagcctgaccaacgtggtgaaaccctgcctctactaaaaatacaaaaattagctgggcatggtggcgcttgcgtataatcccagctactcaggaggctaaggcaggagaatcacttgaacatgggaggcggaggttgcagtgagccaagattgtgccactgtactccagcctgggcgacagagcaatactctgtctcaaaaaggaaaaaacaaagtaacctggttgctagaattcatacagctttaggattcagttctgacatgatctatgacacatccatgtgctttcagttgatcagttgcctcccaagtgtcctttccagagattgagtaactgcaaaaatatccttaaggtttccagagctaaggtttccggagctgagttttccaggggcggggccagggggagtggggagttatgggagggaaggggcctgggagagggggaagtggatcaccagaacggctgaaggggagggctctgggcggagggagctgagaatgtaacacattccatttagtatttcattgattgtataaacaatagtaggtcaaaacttgatagcacatactttgccagagatactaattgaccaggaacttaggttacaacttagctcagcaggggagtccattgaagtgcccggatccacgtagctctttgtgttggcatcgctgctagaggaggaggggaggaaggagcttcactcaggctgcatgctaattcatcgatgtttaatattcatgaaaggattaagtcagtgttgatgtttcttctgctcctgctgagtctccacacctggatccagaatgctccatgatccgagtctttgtgtctttataaactatctttagggagctttaggactttatctcgggaaatattaaggaaatggttttccttaatatcagcagaaagttttcttacacataatctaaaatcagctgcttcatgatcttacccaggtgatctttctctgaattgtgcttttaagcctgggaggttaacatactgcttctctgtggatggggttttcaaattacccggcagcatccttgttggtgctttctctaatttgagatcctggagtccaccagggaactccaggtgaccaccttcaccaagacacattgctggtagtgcagggaaaaggtggcataagcacaggaagaagttaggttcagaggaaatttgtatcctcagcctaatagcaagaaaacgacaactgctaaaatatctggaagtaaaagaagcagcttccttttgtaacctcacgtgagaggttattcctaaggcatgggctcctcctatacctttagattcccctaggagccgtggtatagctgtggtcggcttctggtttctgagcttttccccacttagagctctttcacaggcacagatattacatgcatcgcctatgcattcaagccctcctgggacagccctgatctccagcatctgtcccagtgcctccatacatcatcaacacatccttgtttttcagtgtttctccatccacactgcatttcttagactgcttctcagggatcttcttgtgatcaaatgtggactgtctaaatacagtcactctatgcggggcaggtctctaaacccaaaaactgccaagctgtgttcaccttcaaagaaacacactcctatcagcagacttgggtgcacatagcctggggtgtgaggctgggtgctgggagacttcctgagctggggcacacagatgtcctgggtggtcctccagattatatgctactgtgtgaccatcagtatcctagagaaggggctctgtgttgggattttaaaattttgccccagaagctacagtgttagggtcctaagctgatggaggaatgtaggcctaagctagaagagcaccccatgggagctacatcgaggagaaactcagagcatccctctcatacacagtgacactggacagtttgaaatacctttaagctctacctggtttggcagtggaatttagtagctagaacagatgataatgtttttccctttccctgtgatcaccttggcagcaaccctttacgtttgagactacggggtcttagaaccaagttctgtaagaatttggactctgcaactgtatggggttcatttcacagtagatttgaagctgttggaaatctattgctgttttccagacacttgtaagtgttttctatataaatagatctaattaactttgtctagagaaaataattatctgggtgtaccttactttattaaactgatcagaaaacaaatgcaaggtattaaataataatgatttcttgcacaaacagccatcagtggcctatgtacataccacgccgggtctgccttcaggctgggaagaaagaaaagatgctaaggggcgcacatactatgtcaatcataacaatcgaaccacaacttggactcgacctatcatgcaggtacgaagattgccatccaacttaaaaccgcaggccatagaagccgaaatgtacatgaccgaactcctttcctggtgtttatgtattgttctgaaagacccgtatttgtaaaagctttctcacaaagaaaatgcattactttaaatacaataatagcctaaggaagaatttgcttttcaaatcagtttatcactgaatatattttaaaaatgtgacgtgaaagatattttcaaagtaagagcctattgcagtgtgtagcttcttccctgcccagcccccactttaatccgaggctagtttttatgctgggctagtgattcatttttatttcccttgaatgtgtttccccatcctttcccccatcattatgtttaattatttcctccacgctttaaataggccagacctcttattattgctgtttgcgttgttgtttgggttcgcgctcctaatcacacacaccgggagatcctcctatgaagctaacttgtttttgcctccaaaatagcttgcagaagatggtgcgtccggatcagccacaaacagtaacaaccatctaatcgagcctcagatccgccggcctcgtagcctcagctcgccaacagtaactttatctgccccgctggaggtgagacggctacctcatctaactggactcactctgtcctgtgactcccattctttcttctctcttaactctgccttcagtttcgcagccacctcctctctctgatcagtcgttgtgttggtagtgaagggtgttcttgtgcagcctttctacctgcttctctgtctcgcccagttaacattcctggactctctcacctgattctcattctcatttggctaaggccgtggtgacttgtgctggacgtgggcactctcttttcaggacttccaccgttcttgttgtgtttcgcttctttttgcctgttacctcattagaattgcgtaatccctctttcaaataccaagtgctgatattgagtttttaaacatagctattgctttgatcatttgtttttctttcgactgtagggtctttcattctatgggcatacatgtttctgatgcatatttgcatctctgcatcatggctgggcatctgcttgtgctctctgtcgtgtttgtgttgttttggtgccatcctttaacatcacaaatgtcagagttagagaagccaaagagcaaatgtttgaggtcctaagcttgactgtgtcttagagacagctgtgggcttctccacgccctgggtccagatgctgataagtgggaatggatgctgtctcttccacactctgatatgaatgtcatgggtaacaactgtgagattccagatcgttgtatttattgatgtagcttttttcctttttgtgctctaaaacttgccaatctgttcttcattagactgtgagctcattaagagcaagggcacatttttctccactctgtaaaatctccatccataatgcttagtacagaacagtatttttggtacatactgagtagctaccaaaggatggtggttataagtacttaatattgttgtgtgtttatccaacagagaaaatgtaaagttagattgatttaaaagtaaatgaatgacagaaaacaggttttggggatcttccctcttgtccatctccaaagagaagccttctgcaatacccaggtacattttggcacattggaatcgcacatgctaaagagttctaatcctcattgttattctttagggtgccaaggactcacccgtacgtcgggctgtgaaagacaccctttccaacccacagtccccacagccatcaccttacaactcccccaaaccacaacacaaagtcacacagagcttcttgccacccggctgggaaatgaggatagcgccaaacggccggcccttcttcattgatcataacacaaagactacaacctgggtaaggctgctgcttttatttggctccattttcatcatgaagtctggcattaattccttgatttccttagtgtttgtagttcttgcagaggaattggattgactgtaaagggtgtctccagagggtctcctcagcctgcatctggcccctgcataaatgggcgggtgggagtgggtgggcacaggctggtagctgtctttggtattggtgctgggactgccttttctcctgggaagctctagtttagacagttcaccgtgctggatggaaaggtattgctctgtgctgttaagattttgttaattgatcccgtctcacaaagtaatctcactaggagttataatcattttcaaataattttttcttttgtcagtttcttcttgcactttcattggcattacccaccttcttttgatttgtcgctttagtttttaccgttcacatcagatcagtattcacacatctgaggtacattttcatgcccttgatcatggggtaggggatgtactgagtgactttggttgtagatctgatagctcctttttgtgatcattttgtcaaaattgatttttcttaccatgcaactctttcatgtactcctgaattgtacccaagaaagaatctgtacattgtattatcttgagcaaaatgagattaatcaaaggcaaatatgcatatctttgtatttctgtgtcagttctttatttctttagccgaatcggtggctttttcagtgtagtatatgattcttttaaaagtcagttggtattttcctgctatataatctctatacctgtaattacactgaaaccggttcccgtatttctggctatttttgatgctgcagatggtttttcttccggttatgtccccatcgaattgtctagctagagttaactcagagtttaacttggtcctactattatctgtgctacttgctcaaaactgatgttatgggaatgctggttgagttttggtgattgttattggccctagctcttcggtcttggaccaacaataaacatacaccattaattcccatttctagtgatggacattaagtgtgtccatttgatagaccagcagccttatattcaagaacaagccctgctcaaggggatttgggctgtcattttatgccttgcccattgtgtggtatcagttcagtccagcaggtctagagggcgtgctcctagaatcctttgaaccgtgggacattgtgtcttcaagggcattcttggcatttggggcagggacatttgtgccttcagttgcagactatttaacaaacttggcttctgctaccaggtgctaatggtcaccattacccccaccccaacatagtgatgaccagaaatgccctacacatttcaaaacagccctaagtgagaaccactctaagagctctttctattttgaagtaagggaatggcctgccaagagaatttctcatttagatctggtaacattcatttggtaaactgataactgcttctaaggcatataataacatgtaggtttgactcccctactagtctgaagataatgttacagatttgcaagcaagccaagagtaagagacgggcagctcgttggaaaatatagtaatggagttctttttttttatgtctttttacttattaccatggaacccctggctgtcctgccagtgttctcatttactatagcactgctgtaatttcaagtccttagccagaaacaggctccagaaataagggctaacgaatataaaagtagatggattagtgtaaggagccactgtggcttgccaacataagctatgattttagtaattttaactagcttggtaatcaaatcccctaaccttttcacagcctttcaagccacaacaacagtgtaattgcagctgggcagattgtattttaaattaaacagcactcgctttatttattgcttgcaacattgctgaatgaaacccatttttactttccagttgcgcctgtttacccagatacttgttattgactaatttactgatttaaaatcataatctgttagaacaacgttttgttgctgctgctagtgtgggaaatcctcaaggtaacaactggaaattccacaagctactccccttcttaagcgaattcagatgtgctgacacagctgcgctatcgcttctaaacaaaggcctaggcaggattttccctgcggaagacacactctaaattgcctgttcattttgacaaaagatgaagagccggagggaagcatgaagataatttgcaacttaaaaatctgttttgagttggttttagggtttgctttgttttttatttttgaaagaagaagagaacaaatgagagaacagcatagctattcttagatttgagcattagaatagaaaaaggaaaaaaactggtaggacaggttgaaaatgatgaaaataacactccttcccccatcggcctgggcactgttgattcttacaccaaccagaagcctgaaaagtatcaggacatttcccctctatacattgagaaattaaaaaatttattgaaatatgtcatgaaagatgaccttttacacacacacagatactgaaggcagtatgccatcagtatttggataaagtttggcctcattctcttttttttaattattattttttttgtttttgagacggagtctcactcttgcccaggctggagtgtaatggcacaatctcagctcagtgcaacctctgtctcccgggttcatgcgattctcttgcctcagcctcctgagtagctgggattacaggcacatgccaccacaccagctaatttttgttgttttttgttttttgttttttttagcacagacagggtttcaccatgttggctaggctggtctcgaactcctgacctcaagtgatcctgccgcttcggcctcccaaagtgctgggattatgggcatgagacaccctgccaggccaagtttagcttcattcaaagaaagaaagaaagattggctttgttccccgcctgggtcaggcctttcagggaatgcatgctggagaccaggggcttgggagggatgtaccaaggagggatgttccatcctcagcagctcagagcacgtgtatacgggttgagtatccctagtttaaagattcaaaatccaaaatgatccaaagtctgaaaccttgtaagcactgacatgacactcaagcaataaatgcttattggagcatttcagattctcagattagggatgctgaagtggtaagtataactgcaaatattttgaaattcaaagcccctctggtccccaagcattatgggtgagggatgttcaacgcatattagtatatttgtgcctttcacaggatgaagcatgggcttgcttttgtagcaagaaagattacaccctagttaagttgcaggtttgttttccatccaagttcaaactaatgaaacttattactctaggtgtggttgctggtctcttccaggatggaaaagataaagaaaaaaggcacttttttttaatccctgtgttttatatattttgaattaggaaagccctttttaaaaagatactgctctttgcatcctgtttaaaaacactttgaacttgatggagggaagcaattttatattacacatgaaagagttcccgttatgaaactgaagaaaggaagaaacaaccaggcacactttatgcgttggatcatttattttcattgcatcagagccctcgttagtattccactttctcatcagctctgaagttgtccataactaatagagagccttgaccgccacttcatgtgccctggcaactaaggagagatgcctgcctccttgagtggctcggtgggagtcagggcttgagggtgaccactagccttagccctcagagctgattcatggcagctgctgccattatttttattatttttgataaaataatattataagcctcaaggcctctggccctcacagtctatgaagtctaggtttccatgcaaggccactttagcagatctttgaaattcggttgactttatacttcatgctctgcccctcactgcctccctgacacttttctctaatttcagcttcttttcacgctacggccccccccgccccccccccccctttaaatcaccagccttttaccaatagggctgattgtctttcacggtagcctacatgtgattccaaggtcaggctggccttgtgtgtagcattcagaagccctgccctctttcatgtaatagcagtcctcagctttctctaaatctggcatggtcataggctaggtggaagcccaagggtcccccgctggttgtggcgttacctggtccggatcagagttagcattgagtgggtagcttttgagaaattcagtgctttcagtttttcctctgtctgtagttaaccagtcatgaatgtttaccagattatcagcttcttggaccttctcaatcctaaatcagcttagcatatttctttatgttctgtgtatgtcagtgtactgcagaatactggattattttgtgcctctgcttagccttttaaaaaaatatattgggttcagggtcaatatgcatcacaaactgctaacaggatttctttcttcatttaaaagttcacctagctagcaagaagcaagggttgatttttgttgttcgtggtcttttttgattcttgccagttcccaagatctatgattatgattcagtgatactatgacttacacggttgacttgggaagcagaaaaatctagtaatttggcagcagcaaaggccctattataaaattgaatgaagctgatatcaaatgtcttcacagtttactttttttaatcttaagcttatttggttgatagtggttttttttttgagtataaagatatggattctcctttttatgtttttggaggcaagactcactgcatcacccaggctggagtacaatggcacaatcacagtttacggctcactgcagccttgacctcctaggctcaggtgatcctcccacctcagcctttcaggtagctaaggcaggcatgcaccaccacactcagctaactttttgtgttttttgcagagatatggttttgctttgttgcccaggatggtctcgaactcctgggctcaagcagtcctcccgccttggcctcccaaagtgctgagattacaagtgtgagccactgcatctggccttacactgcatttctttttcttttttttctttttttttttttttttttttttgagacggagtctcactctgttgcccagcctggagttcagtggcacaatctcggctcactgcaacctctactttccgggttcaagcaattctcctaactcagcctcccgagtagctgggactacaggcacacaccacacccgggaaatttttgtatttttagtaggaacggagtttcaccatgttggccaggctggtctcaaactcctgacctcctcagcctcccaaagtgctgggattacaggcatgagccatcgtgcccggcctacactgcattttaactgggtctacataagtgagagtcagctcctggactctgggtcataatctttgggcaacttcctgttctctctgaaactccatttcctcatctaaagaaacagaccatgtgcccaacctcctaccaagggtctgttgcaggattttacatctgaccatgcctcataaatcatgcagcctgacccaggttgtcagagtacatatttctcttttgttgattctctgtggtatcttatgaagcttatgctttaagaaaaaaattttgtaaacgtttaaatattaagacataaatgagaacttaatctgcagaacttggtcaagaatctcagtaaagttgtatcataactttgtgagtttgcctgatgaaagcgactctccctggagtagccacgtgacttcacagaccagattgacattctctgctgagttcagaaggagtggaggggagcacaagtgctggaggagggtgtggcagggaggcctattccctaacgtgttaggctggctcccctcaccgggagctcgggacccatggagagatttcgaaaccgttgtccccactccctctttgtgccacattcactggcaccctccattctggtttccctagtaacatcactgctgggactctcttccccttccccttctcaaggtctcagggaaatggttaacctttcatgtaaatattcttactctcctctctccaccaagcacaagaaggaagagtacagtctgtctcgagagacagtcagccaggcttcctgtacaaaacagagatgggacccatctcacgctccaggcatggacagcctggttgccttgaaacaaacagctcaagaagaaaagcacccagtaactgcacacagatacttccacttagcatctactgtcttttacatttttcttgcaggaagatccacgtttgaaatttccagtacatatgcggtcaaagacatctttaaaccccaatgaccttggcccccttcctgtgagtacactggagacacatggaatggtctgaatatgtgtgttcctttatccgctcaatgttgatggagaggccctgtggaccttctctatctccaggctttgtggatctcattggtttgtgtttcttaacagaattgggtgtttagctgaattgtagtcatacattatagttcatgtgatatccagtacttatgaaagaggtttctgaattgctagcttctagcagaagatagaccttgtacacaggatgttcaagagacgttctctgcaggtgacaatttaagtggcactcattcattttgtaacttagcaaccactgagtttcagtcatattgctgattaagtcatcagaacaaaaataatgaaaatagtatgggagaagaaggcctaattaatcatagaaagtttctataagtcatttaacctgcagatttttaaagtttttttctcccttgttggtgacggctcagtaggagttgagctatatacttaaaattggattttgaatgaaaccttcacatacatcctcctcaacaactcactctcagtttgaaaaagccgtagggggtgacagggcagtggttggactccaaggctatttttaaatgggaatttttgttgttgttttccaagtgtaagaacctttttgttgcctggtatattagggcaacattggaggctgcgaaggttaaggttcaatcattattcattaggttatacaggtatcccacaccaaatctgtttggttcctgggttcaaatagaaagaaccagagagttagtttagaaaacaaaagaaagcatttttttctgaatctgttggattcctgaggttcagatagcaaatatggatagttcagataatgagggcataccagctttatcttgaaaaaattctccaaatctgtttagttcctgagcttgactagcaaaagttcatggtggataataccaatattagatcatcaactgcctggacaacacaaatacagttaaccatgtctaacatttttatattaaccccctcttcctttcctttagtactcagtatttatttaattaaatggtactcaacttcaaactccactgttccatggaatgctgcggtttccctttgaagcttttgagctagcagcccatttccggttcttcatacagtcagcgcatctgagacctgagcatgtgataaagcgtgttgctagacatggtcaagagttaacttgaaatgttcatatttagttcacgctcaatgcataaatgtaccctagcagaaaagagtacagaggtgttctatagtttttaaatgttgcctttgatttcagaactcctagctaatgtttatattttctctctcccttccttccccggatactagcctggctgggaagaaagaattcacttggatggccgaacgttttatattgatcatagtaagtaggcgctgttatggacacacaggtgttgtgggttagagggaaggagtaattcaaacatcatagtgaaagctttgtcattttactctttatctaggcagccaggtgttatgtggagaaaatgataccagagaatcagtgccttcatacggtactgtgcattcaccccaagtttgcttaaagtagcccatcaaactttcacccaatctgatcttgtgacctattaacgtgtttttttttgttgttgaatttttaaaccacattttgattgttgatcccttgacttttgcacatttaataaatacactctggtaatagaaaataagattagaaatgatgatttagtcaaaaatctgtgaacagtgcttgaagcagcatgtaagttttttagacactgccttcaagggtcctatggcaggatgcccgctctgaccttattttctattcacggcatgtttccttgcacccacaacactaatatatatgtattttctggaaattgtagtatatttgctatagacatttgctccagcacctatgaaaaaatgtgtggtttctcattccaactaaaagttcaactaataaaagtttgctttttagccagtgggattttttttttctcattctttttggaggtgccatgttcttcatggaatcatatttctatgtcccttaaattttctgaaaaagtatattaaaaagaagccttcaaatagatgtaaagtttcaaccatgagtgcaatttggtagtatcttggtctttgctttcatttggttcatgaacagaaagttagggtttccctggcttcacaatttcataactaaacaaaagcacgttgatgagccacctgctgagaagtctggccacaagtaatcctcacacgtataggactggtcactatctcataggcatagtacgtttttcagatgttactaggaggcagagacattgtgaacagaatttcactttcaggccctgggggttgagggcttattataaatggaattaagcaaaagtaccagcagtttacaattcaactgaaagtagaagtcctaggtgtatttagaagagtgagctaccctttgtttaaaccagatatttcaaggtgcagagacttagtttttgtcttttatcaaaaaatgggcagatttgtcaactgtccagaatttcatagtaagcataaagtatttttcctgctttcatgtatgtgtatgccctacttttttccttaatatactatttatttattgttttaagagaatttactaaaatgagagagaggccacacctctttttcccatgaaaaacaaaataatagtttccggcttggtgcagtggctcacacctgtaatcccagcactttgggaggccgaggtgggaggatcagttgaggtcaggagttcgagattagcctggccaacgtgatgaaaccccgtctctactaaaaatacaagtaaaaactagctgggtgtggtggcgtgcacctgcaatcccagctacccggatggctgaggcaggagaatctcttgaacctgggaggtggaggttgcggtgagacaagatcataccactgcactccagcctgggcaacagagggaggctgtctcaaaaaaaaagaaaaaagtttcctttatagtattttttatacatcacaatcacagttttaagacaggtgtgaataatactgatcattttactaaaacaggtctttactggtaacacatcctggtctgtgacgcatggagagcattgcacacaatattgtgacagttttctggctggagatgtgatgcttaggtccccctaaaaagaatgttgtgaatgtgtttcgtataccgcaaggagccaaaaacagaaaaacacaattacaaagggctgtcgtagcatgcgttaaaatagtgaaaatcactgactatttcacttgtggtgtcatagacctagtatgatacatagcagatgcttgatacttggtgacttgaaatcaggttcatggaggatcagtggtgaagctcttaggaagttgttgtgcttgatcagaaagtgaagtgaactcacttgaggagcagtaggtgcccccactccggctttccacccccaccggcctgaggctagcgcaactccggcttactggaaggtggaagaaggtaactacctgctagatgcctgggcttttccttactcctgatcagttctgcagttactccagcactctgcccaaacatttcctcatttcacttgactagagcagcacccccgaggctccattatactctgtacagagcttgatgcaactaagctgtgccaatatatttgtggccattgacttggagattaaaatttattttgcccttgcacaaccatattgaaagattctgttaaagagatatagcataaattaagtgaccaaaaaccatttaagaaaaggatttgtttacgagtgcctccttagctgttcatgctacgtttctaccatcgctccataattcatcaaggtttactcaatggaaagctgtagagcagtacacgtcagtgaaacagttcaagtcatttgcctttccacaaaattcagtctgtgaaaactgcagaatacctatcttttgaagaggctttatcaggctgacacatacattccaaatgggttgaattacctggaagataacatttaggaatgtcctttctgtcagaagaaagcctctttttctaaacaatcttatagcaaaactcagcatctgattttgctgtcataatgcctacaggacaggaaccaggttatgcccacgtatgccacaatgccgtgagtgccgtcatcttgtaaattgcttagagtcatcttgtcttccagcatacctggcacgtgggtccacctggaattacagatgagatgatgagatgcacttgtcttttcaataattaattatttctgctttgtaagtttttcctgagaagttagacattttcaagatgaacaatactcagccatcataaagatttaatttcaagagcaacgaatgatcgagactaacctctttagactcctcgattcctttgtttgctgtctatggaatggctcctggctcttgggcctcaggtgggaggttaaaggaaggtcttaaactgaatctctacatcttgtaggaatgatgtcattcttcttaaagaccagacaggcccagcagctgagtaattggccacaggtatcctatctacaacattagaagagaaaattgaattccagtgattttgtaaagtcctattttagtctttcctgtcaacagtcttactagacctgttcatcgtgactaaactgagtttctcatccttccacttccttcttgtccttttattggaaatatatctcaaagaggaaaagcaagtttaaaagccaaagttctttaaaaaaaaaaaaaaaggataactggctaccccatactttcatacattgaccatacttcactgaagaattctttatcataaccatgtagaaacttgtgttgttccaaaagcttaggctctttttaaagggactttgttttcaccatcagcttcattcagtcattaaaaaaataatgcactaagttcctgttacctgctgggactggtcttaagtggtagagaggggattgcaaagatgaataacacacagtccctgtccttggggaggttaggtccagtgggaagtagcaggggatatttcaggtgttagaggagtgaatcagttgttacacagaaacagaagaggcaaggactgcatctgcttgggaggtggttgggcacagggatggggccctgagagaatgggtcactttttagatggatgacaaacactgagtaggattgaggcagtcaaagccccaggaagagtgatcctaggatgcgtggaggtgtgtgaatatgtgcagatgctgccacgttccgagaaacgcagcattgctccaaacagctagtgtgccgcaggggcgcacaggccaagccaaagggtatctgcccggtgtggggactcgggctcaagccacaggcagtggggagctcccaggggatttcccagaggggagggatggggtcgaaatcgttatttagagagatccttttggcagagctgtagaagatgtcttgaactggggttggggggtgagacaattcccagtgacgcccagagaacagttcagggaaaaaaaatgagccctctagcaagaagcttatcaggaatagagagggttggtccgggaccaccagagtgagtgacacggccaggttcctgattgggacagtgagtggattgtgatactgcacattggaatgtaaggtcacgttaccaattttggtgttgggtgatcagaggtttggttttggtagagttaagctgaagtacttacgggaaacccagatgcagatgtccaggatggagcttgaagttcaggtctggtctgaggacttgcgaatcccaatgagtcaggagttattcatttattttctgctttgatgacaatatccattgatacggttataatccaagttggtgttttaaggcgcaatttttactcagctgtactccgtttcctttatttggttttcttttctcttgttttccatcacaatagcaacttttactttccaaagtcttctgtgaaaggtaagggacccaaaaatgccttttgcttccatcaagattctctcaaacagttgagatttttcatgtaaattttctgccagcatgaaaacaaaagattctagaatcatcacttgctttggtagcttttttttttttttttagcttttcctctgcttctattaaaataataataagactttttaaaattcctaatatggtcattaaaacagaattcactaattattcttatcagctcacttacagtgtatacagaaaataaacagaatcaatattcttcccctgcactcccccgccccggtccccaagacaggtgcagatcgggctggagcatagtggcacagtcatagctcactgcagccttcccctgggctcaagcgatcttcccacctcagcctcccaagtagctaggactacaggcgtacaccaccacacctggctaatttttttttttaaccttttgtagagatgggtcctcactatgtttcccaggttgggcccgaactcctggcttcaagtgatcctcctgcctcagccccccaaagtattgggattacaggcatgagccactgctcctggccaccctttacttttcaaataattttcttcttctttttttttttttttgttttttactaacctagatatccaaaaactctggagaacctactctccctagtgtgccccaccccccgtacctttcatgtgagtccattgcactctctctccctccactccaccctagtacacacacaggaatccgtaaggtctttttaattatgcacagttacaaacaccaagtgatctaaggcagctgttgtgtattatcacctacacaagtaatggtatagatagcattgaacagtcttgtgcacattaactcacttggaagaaagcaaaccaccttttgccagtgtgaccaaacagaaaccatgctctgtaatcttcctctgctgtatctaattctcttttttggactgcctaagctgctttgatttttgtgtgcatatgagtgacgcatgtaatagattattcatttgttcaatgcaggattcttaattgaaagcagtttttcaacaccataagtaaagagaaaagtatttgaaatgagaaaaaaaatcgtgtgtgtgtttgttagccttttgggaaactaagactttttaaatgctttttttcaactaaatgaaaatcaagatcaagttataaatccttaaaagaacaggggtttataattcccattttagcaagttatttgcccaaaacagtatgaatagatggtttatctttagttgtgcatttttgattgagtgtttttaactaaacagtatgtgaggggggttgccatatagactgtagttacctgctaactctgaaatactaatttgtctttagaacacagggtgggggactggacagcttttgaagaatccagaaatacttccttccaaaactttctttacatagaatagatttgaactaatgttctgattttttttttttttttttaacattttcagatagcaaaattactcagtgggaagacccaagactgcagaacccagctattactggtccggtcagtattttcaaattctgcctcttcagtataagattttggttacgtgtttacgtgtttcttgtgtattactgataacggtgatgtcaagggacaacggtgattgagtagttgactagaaacagagcactttgctgccatctccttactgaagtttccaggtgaggtacagctgcatgtgccttttcagatggatttcattataaaggaaaacagcttgataacgacagcagaattaaacatttttcttctcctttataaaagggtggactataagtatagtcaaaattccctcccttcctttttatatgaagcaaaaccaagccctatcttcataaagtgttatcatttctttaggccaggagtagtaaatgtatgccaaaagtttaaatcttttacaactttcaaaaatctgtagaagtttgggtgagattatagctaagttcaggagctggcagagttaagagtttggaactctgccgacccacagtgttctcatggtcccctcatatatgccgggtggaaaaagaatcaattctgatgcaggcgtgatgacctcttaaaacaccgtagcacactgtgttcataaggcagtgtgagaaccccactccctgaagcatcaggagacatttggtatctcacacttgttaacaagtctgtagaatgggaccacactcatcagcagagagcacaccaccagcttttgtcagtggctatacgagtgcagggaggtaatttggaattacaggagttgtactgcgatcagcagaagattgcaaatttgggattcttagaccagaggagcaaaaggaactgaagtttgttatatcacatgctgagctaagaggccagtaggtagatttaaaattccaatttcatggctttaatctgattccattcaaattatgttttgaattagtaagatacatccatttgaaaacttaaaagatactacattgcaaatgtgccccggtaactgactcctgttagttacttgttggatttgtttagtcatttgggtactatttcctaggcaaagtgcccagtagtacctgggtaaaaacagtcaacttttttctctatgcggcttaaacactgccttactctgatgcttccttttgatatatatatattcgcagtcacagttgtttattggaatattattttctcttctacatcattagaacaaggtaaattcaagaaactattctttttaagtgacagaagacttttgacataactttgaagccttttcaaaatatttttatcacttatcaattaccggccgtcactcaaacactgctagtccttattaaatcttactgaaaattgctcagcatcataaagccaagtagatttgcccccaagaaagagctctctgctttctgttaataaaagacccttgtttattccttcatttttattattattattcattatattgctttcaatagaggagaatctgtatttaggtagttatcaacttagtgtagacatttggcctttgttgtcattcagttctaaatatttggcaattttcatttgatttttcttcttgacttatacattatttaaaatatgctttttagtttctaagagtatgggagggttgtgcctattcatttttttttattgatttctaattttattgcattatggtcagataatattgtctagagaatatttattattggatgtttatttaaaacttcattggaagcttgatcactttttgtaaatgttctttttctttttaaaaagaatgtgtattgtgtctttggttgaatatagagttctttttgtgtccattaggtcaagcctgtggtgttcaaattatctacattctcattgctattttgctattggatctaatcaagatagttctgtcagtctctgtggtgactgttgccctgtcgatgttgtctgaggtgtatataactacattctctttctctgttcgtatttgctgtttagcatatcttttctctctcgcgatattttatcttctttcttgccttttgttcaattgatagagtactctctattttattttctctatgtgcttgcaggctgtactttctatttgtattcttatagctctcacattaaactgtgtaacccacatacttgacttagggttaaaatgaatcactgtctactctccttaacatcaggacctcagggaacttgaatgccattcttcccactcccatttgccacgtcattgttgggtggaattttaaaactaccttgctttaaactttcctaatagtcaaatagtcattaatatgttttatcttttttctccctactgtccatactgatttaattttaccaaatgtagacaaatttctttgcccaccattggtttgcccaccattggttcttccatccattttttttctggggtgagttttgatcttagtgaagcctagtccagtttatggttcttactgtgtggtctgctgaccagagtatcagtatcgcctgagagcttgttggaaatgcaagttttcaggtcctaccccagacctactgaatcagcacctctgggggtgggacaccagtctttgttttaactgctctcccagggattccagtgccccctcaggtttgagcacttctgcccagcagcactgccagtgacagtctgagagtggtaatatctcttagtctttgactcaaaaggtctcatttgacctctctgaagttcagctgatgatagaaatcttggttaaattattttccctcagtgctttggagattctcctgcatgtcttctggcctccataaatgatgataacaggtttgctgtcaatctcattgtcgtttctgtgtaggtaaatggctctgttctctagtgattttgaatttttatttgtgtcttagatgttttacaatttcgctatcatcatgtacctatgtgtggagttctcttcatttatcttgctttggactcaggcttcttcagtatggggattgtgtctttcctctgttctggaaaattctcagctattatttcttaacatactgcatttttccgattctctctaagtatctgtttctgtaactcctattggacatttacttctctttcacattgtctgctttatctcttaacttttgtgttttctgtctctcactgctgtattgtgagttattacttagctcttccagttaattctttaagctttttttgtaatctctttatcagttcattgtgtttattatttcagtgactaaatttaattgctcaaagttttatttggtcgtttaaaatttgcttttgtcttcatagttattttgtcctgttctctttatctctttatttatttttgatgctttcatctgcttattatttttaagatatttatttcttagcctctttgagattattctattatctctggtcctaggatcattaaatctcccactacgtctgtagactctccttaagagtgtagattattgcctagttcagtttataatttgtgtgtgtgtgtgtgtgtgtgtgtgtgtgtacatgcatgcaagagggagagagagagcatgagcaagctcatttttttttcctatgaggcttttgtaagtcctgacctgtatttactgttaacttcttagcttgggttcatgcacccccagtcagtataactgtggacctcatacccactttggcacaggcttggagtatggatttattacaggtctgtttctttttgtttttctcccatttatggtcctggacagaaggtaagcttccttgcaacttccctggtccggtgggtagagttttcttgtcccctttccagatgttaggttttaaacaatgactgttctttctccatcatgtagaccaaaggccaagttctgtgtccccatgggagattaaaacccaagcccctatgtctaggtccagtgcccactgatttctctaattgtgagtctttctgcttacctagtacctagagtttctcttcccaagttttaaaaatatcagttctaagtaggcctagcgtttctacatatttttagggagaggggaccctttctgtggcagctcagtgttcagcattcctgtaagttagcatgctctgtgtatagcagatatcactagtaatagcatttagtaagtgatgttcacacatgctgctgtcatgaacactatctcatgttgtgtaacactttcatttttccaagaactttataatcagccgacttgaaactcacagtcgtcccctcagaaaggcagggcaaatgttgttatttccaatttgtcagaagctcagaaagcttattctgttgctgacagtccttgcaagggtcagaatcaggaccggagccccagatgcgctggtgtcactgatgtccccgtgccgggcatgagcccttctgtgcaaggagctccaatgtctcccggccagtgatgatgtgaaaacatttagaaccgacctacacaataaggcagattttcattctgtacccaaaacaggaacacagatttaatgcagagcaaaagggctttaatcaacagatatgttcatttttcacgtagacctattttacaagctaacttgtaagccagaaaatgacattcgagattttcaagtgagaacaaatgatttggtccaataattaaaaaaaaaaaaatgtacgtgtaatctcttcagaagctgcactggaaggatgtttgtcctggtacgttgttggaaagttttcaggaagagaatgtaaaaacttgctcttcttattctatcatgagaactacctctggagagaaaagataatgaatgcaagaggaagacagtgatttttcagctttcacgcatcattccccagaaggagaaaggcttgaaatatctcaacatttccgcccacacctcctcagcccctgccaggagacagagcaggcaagggaacgggcatcataggctgggggccacatgttgaaatctgctccttggggaatttgtcatttaagacagtcgaacttgcatacacagtgatgactgtttaagctttttttccaacattttcaggagtagggggaactgtgatgtaacagtgatgtttggagaaccctcacgaatacaggaacaaacaaaaaatagttgctgggaatcacagactttcagaaatagaagagctgagtcacgtttgttcatccagtcaaattcttccacttaacagtgaagaaactccttagtagagaggatgtgatgcagagccagctgatgagagtctacccgagagtgcaggccttctaacgctggcaggagagagtggaaggaagtcacttttttagttcctatggggtcatttttttcctcatggcactaccacggtttattcattgatttcctattgcctgttgctctcaacagcttgtgagctccaggagggaactgggaaagctacctttggtttatgtactgttatttttctggcacctaaaatgccttgcacagagtaggtgctcaagaagtatcggttgaatggacgagaatgaacaccagaaagtgagaaataaactagagaggaaatcttagtttgtgacgggatgtactgttggtagagcagaaaacatgatctctttattggcttatgtcagaacattgtattctttttcttattttggtggttgtccaggtattaacaaatttataccttgcctagactcagaattgctatgtggtttcatcagactaaacactgcctaaaataaataggatgtgaggtcaaatctgttgttcagtggaaaatcaaagaagactggcttaaaaactaagaaaagaccataggcagtgtaaattgtctatagattgctcctaagctatataaagatgatgtattttttgctctggaattacagagcaaaacactgacgtgctcattttctggaagagtggttgtttgttttgtttcgggttttttatataaacatgtcttaaaactataaaagagggaagttcatgttcttcatttcttctgtttctggtcaagataagtatggtgaaagtgtaaggtttggagtctggagatactagactaaggatcagtatattttattaacttaggccgaaatgataacagcagaagtattctctgctgaaattcatactagtggctaaaaagcaatgagttgttttcgaggctgtcatagttaatgtctgtgtatatgcaaaacccaatcctttttgctcataaaaatatcgtaagctttttcagtagccaaaactcacggccctgactctaagatattgtaagctactttacaaggtagcaaataaagattatttaaatgactacattaacatgttactcctttgcctgaagagatatcacaacttttgaatgactatagttaactcaattcctgagccctcaactggggtactatcactctatttcatagataaagcatttgagatttaaagaaatccttgcccaagaccactaaatattaagggacaaaccttctgacttctaaattgaggattttttgagaatgccatctgcctgattttatattccttgataggagtgtcagttcacttccctttctgctcgttgtatttccccacaaaaattcgttaaaccgtaattagacttttcaaaatgccaacgtaggtcattctgggttgtatgttagaagtatttagccaataactcttacctaaaccacagcaaaaaagaaaaacagaaacaccctgactcatattctgacaaaagtcacttggaaagcatgtttagtttgtgtagcgtaccccaaatggtttctcaaatagcagtatagctgttttcaggggtgaaagctgcattcaaagctgattagccctcatcagttctaggactttcccctgtgctgtgtagacattatctaatttttccatggataatctgagaagtgagaatttacggtttatgactcatgaaattctcttgaatgttgcctcagtatacataaaatttcaggtgtattgtttgcattatctatatttataaatttatcttccaggctgtcccttactccagagaatttaagcagaaatatgactacttcaggaagaaattaaagaaacctgtgagtaatcatgccttccaaaaatgctttgtgttagtcatttgtaagttaccacagtcacttcagtgagaacaacttggttgttacttttatatgaatgctaaaaatattaccttccttttctctctgcactttgatcctcctggttctaaaatctgaattttctttttaacagaaatggtaagtgaaaattaactcagtgttacatatcaaatcacctgaagggtaatttcctatgtaatacataaaaagacaggaatgatttttatgggatataaaataattcagaaccctagtcacaaaatctgtggaagcctattcaattatgcgcagttatcatatttaattaacctggatcccggtaagaaaaatgttcaagtccttccttgtaaatgcaaaagcttagtttcaactacagtatttataatatagtgttatatttaattataataattggcagtattacgtccaaatgtaattttctacttataattatccctggcagtttaaaacctagaaactctaaaaatttttatgggcaacattttaaattataacattgcattttctaatgacacaccatccccaaattgttcaacattgcatcctctgttttactttccgattcctccttagcagttttctcttcaattttctccatcactatggttacacctctagggaggggagagaagcggctgcagctcagaccccctctggtggcctgggctccattgccatctctccctgcctcctcccctcagctggttcctcctgcccgggaacatctctggatggggcacaatgtctgctctcatttaggggttttggtctctgttccaaagtcctgattcaagagcttgcgggtaactgctattgaaatgattctttgccttcaaaactcaaatgatcactgaaaattccacagttttctttgtgagtcatgtcccctggtaatgatgatgactgtggtcatcacccagtctcactctatggctctcacatagcagtgtctgctacccggaaaccatctctgcacattcattcttacagccagaccaagcctggaccgcctctttgcaggaggcagttgccacaaccttggtcaagtgttttgttattttcatgtcagcgaaccatgctttgggctgctttccccacacttggcataatcaggatcccactccccatggcaacaaaatggacttgaggcagcgtggattatatctaccacctggcggccctgccacagttgagcatggataggcccaacctggccaggtggggattattacaggttttgactacctgggctaaagtctcttgagtgaagcaacagatacagtcgactgcctttcggttgccctatgctggagaagtgcccacagttgtttattaaagggggcaaggaggatgttctccttcgcagcagagttctaactttcctgagcatcgctagtggatgccgtgtgtcccatcgtgacacagcaaggctttctgtctgcaagggaaaacccctaaaggagagaatctcagttggaaccatttgtcactgcctgtttctttgaggactgccaacttttctaccatttgctgttgtttttattagaaaacaaagtgtgtatttactgtatgattatgtgttttcttttgtcttttgtgtaggctgatatccccaataggtttgaaatgaaacttcacagaaataacatatttgaagagtcctatcggagaattatgtccgtgaaaagaccagatgtcctaaaagctagactgtggattgagtttgaatcagagaaaggtcttgactatgggggtgtggccagagaatggttcttcttactgtccaaagagatgttcaacccctactacggcctctttgagtactctgccacgtaagtatatggccacacccagtgtgtgtcccccactgagacagttgtatgaatttaaacagaatgaaaggataagcagctcatgagttcgagatgcattaactctgctgagtttgttctctcctcaccccacagccccttgcaagtctagaacaggttctgactctacgtggtgaaatagtgtactctgcgaacatctaacattgattttttttcttgtctattgggttcatggagttgaaattgaaaacgtggataattatgataaggaacaggaggcgattttcatttgcagtgttcaagaggaggacttgtcagtgttagaattcaaaaacaaaggaggtgttttttgaacaagagtcgtttctgaggtctcctgtgtaaaggcaaattgtaaggactttgaggacctaggaccatgccctgctcctgtaaggaaagaaccaggtttccccttgcattaggatttcatcattgccaggcttggaaactgaggcagactaaattgctttctgagcaattaaacatcagctacttccaggccagccattcctccttcagactctgaatcctccaagggttgggcagtacccaagcccccagtagaatagtcattgaccttgctgaagggcatttgtcatcactccagccctgggctctaaggggacgtgggttcccccacatctcccacctggtaccagtctcctgggggctcatttggaaggccgcctcagtacattcttcctggttgctctagccaagaattgcccaattgatttgttgttactgagtcccatgagaaagcccactatgtacaatgtatccaactattgaaggtggagggcagggtggagagagacaagatctttacctcttctccacattttcaaagatacccccaccccggaggaatcagtctgtgatcccagtttgaaaactactgatccacatgattgtgaaccaagcaagatcatttggacaaatctaaaaatttgcaggtttgcatcattgagagagccatatcctgttcctaatcccctcgaggccttttcagagcagagtagtggtcagaagacagaccaagggttgggcccatagcaaacatcttatggccaagccaaaagcctctggaaggaattaaacttccttcatcacagagacgacctaaagtactcacatctttgggaatccctgcacagcccctttattatgtggcgtttctcatctccccaagatatttggctgaaccatatgaaatagacacttcgtaggtcaaaaacagtcaaacatcagcgtctcttatggtttaattgactttagagggcacatgcgtcagcctccatggtgggtcacggttgagcatgtggtaagtcaggtcctctagcccacacattttcccactaggtacagaatgctcgcagggacactgtaaaagttgagtgacaggtggcaaacaaatatgcaaaatcttgcatttgaaagtgtgattgggcttttcttctctttctcctcaaaagggacaactacacccttcagatcaaccctaattcaggcctctgtaatgaggatcatttgtcctacttcacttttattggaagagttgctggtctggccgtatttcatgggaagctcttagatggtaagtcttgaagtaataaaaataggtcagtgctgcttgcggtttgctagtaggtgtcttatctttcgcatcatgggtttttaagcaaaagcttcactggtttactcataaagtatttttatgttttgcccataatggatgtccttttctctggtagcttattttgggcactgaagacatagtgtctacacacagttaaaaacaaaagtttttttttaacttcagtgtaaaacacagaacattatgtatttatacatttgtatgttttctggaataactttagtgaaagcaagatttgataacagatggaaaaactaattgaaaagttaattaaaatgatctcatctatctaatatcctgtgattattgcgtttgtccccaaattattttttaatttgaagggactaaataatttcaaaataatgttactgcttagctaagacattaaccctgaaacaaataacacaaaataatttcattcttatttaaagcatatagatcatggaagaatttcaaggtaccttgaaagttagaagtcaaaccctctacctggcggtatctataggcttagagacttctaaaagatttggccaattcaaaatagtgtccttaagaaaacactacagaaatcatcagtgagaaaaaagcatcagaaatactttttaagagcctggaggtagagtggttgaggatgggaagagggagagtaggatttgagattgacattgcagtaacttataagaaagatatttccaagggaactgtgttcattgcatttatagagccttagctattctaataaataatttgtataccctctgtacttttcccatgaatatgtttttactgttaattggtagctgatattgatgctctgattttgttgctttatttggtagcagggcgacagtaaacactttttttcctctagaaggaaactaaaccacacactctttccatgtatgtatagtgtgaatatattttaatttccagctttggagtcatgccatagattgtttcagcctgctccaattcactccaactttctcagaaggtcagtttagtcaccgtatgcaagtgagaagatgctgttagttgctacagtgtctttaataccctctctaacagggggtaatagagaagcataagatatgatcctgaccttagtcagcttatattttagcggggggaaaagagatgagaacaaaaccagaagaatcacagtgatagtgtctgagcagaagggagtgcattgagtcctcagaggagaaagtgacttggctggaggctcagggaatctttcccaggatgagctgcacctcggaggtggggtagcatttgagcgttcaaaggctggggtcatttcagatgagtgaggaccagcccagagtcaaggccttgtggaagaagatgggcggaagcaggaaccactcagggtctcaaggagctggctaaagtgaccccgacaagagtgatcacgatataaacctggaattgcacatttaagagtccaagtgcacatagatgggcctagtcagcagtgtcttcaaatttcccacagatgggaatgtccctgtcggcagggctcattctgcacatctgtccgatgggaatgtccctgtcggcagggctcattctgcacatctgtccgctgctccccctggtcggcttcatgcttttacttccccagacactggagtctattggagcctgcatagggccacgctgagccggggagaattggcctgtactgcagagggtgggtgcctggtggggggatgaaggagcagaagcaggagcctggggtgccaggtctggtggggtcaggaccccctgtgaggaggtgcgtgatgcctttggatcaggtgaaatggaggcacctgcaggacgcctgaatggtgggaggccgacctcgctgctgttgcctccctgaggcctctgccgtccctccgcggggggttgcacaggccctctccggggccttccccatttccagcctgtccccttcctgtgctttctccccatcgctgcccaagcaatgataacagaagacagatggaatttcacctggcctttcactgactccccactgccctcagagagcaccccaactctccagcaccccatgtgggctctgcactgccggccccttctctggcctgtctacccgccctggcaaacggctggcaagtccccagccttgttcctctgcttagtgtgcccttttctcccccaattcctacgcctgatttgcactgcggactctgcttgaccttgaagctcatctgtcacctcccagaggcctttctggccccactctgctgcgccatctctcttagcacagctgccctcctcatgccactctccccctgatctcgcctcctcgcttgtgcaatactgtagaaggcccttggttactccttcatggtttctcatttacattgaaagcaggttaatcttttctttcatgctctgatacatagcagtgtcaaagacctgaaactaaacccagtgtttaccgtgttttaggtttcttcattagaccattttacaagatgatgttgggaaagcagataaccctgaatgacatggaatctgtggtaagtaaatgcacgtcacacactggccatcaccgggcactcgtgtcttatgagaaggtattggagagccatatttgtagtctcagccacttttatgggtgttgcattccatgtgaacaacaggagacatttaattgcttgaaaagttcattgatctaattcttgtaataaatcattgttcacatttcctggaaccatggtacctagggtggatacatccaaatcccagttgcctctgcttacccggcataggacttgtgtgaacttactaaatccaagagacagctgaagatctatggtagcctgtgttttctataaaaactgctgctgctgaatgtttagagcttcatccgctctccctctgtttcctgacatcataaaaatggcagaggcaaaggtcaaaacaataggaagagtatcaggcagacgtcctagacatggatgagtgacgccacagctcaggcaagtgaacacttgagacgttctccaagtagtgatttgggttttcatgttgcatttaacattaattttacctagacagaccattttagagttggaaggattttattttttttttattttttttattttttgagatgatgtcttgctctttcacccaggctagagtgcagtggcgcgatcttggctcacttccgccttgcggattctagcaattcccctgcctcagcctctcagatagctgggattacaggcacacgccaccatgcctggctaattttttttttttttttttttttttgtattttagtagaaacgaggtttcgctatgttggccaggatggtctcgatctcctgacctcatgatcctcttgcctcatcctcccaaagtgctgggattacaggtgtgagccaccgcacccagcacggatttgctataaaacaaaaattgatgttctttttataatatacttctgcttctgtttttcttttaatgtacctataccccacatctacctccagagtgtatgggtgtttgcccacacgccagcacacacacagggccactgggaagcgcgtttgtccatttggggtatttgcagctcattcgtgtttgctcacttgagttaaaaagcccctgcatgatgtcacctgcctgtgataccaactgtattttgggcacggttgggtagatgagctgtgtcctcggccctgaccagcgctgactcagtgtttctgttgctcctcattgtatgaaaggagaggaagaggccagcagtgcccttgaacccactgctggtttgccagtcatggtgggttgggatgcacacctgtgattccggtctccactttgaccctgtgtttgtgctttctgctttcatcactgtatgatgaagcagctaggagcacaggaatttctcttaacgtctaactttataccacatgctgacagttagtgcctaaagtacagtgcgtgtattatttttaccctcttcacagcccgtcgtgtccccagcaggagagaccgtggagggaccagggacaggcgcttaggcctgtgactgatcctctggattctgaaaccagagcagccaccctttttgctgacattaacctggagagtgatcaaagcacaagaaaggggataacttaaaactattggtatttacttagttggaacattattttacttatttatttttttggcgatagaatcttattctgtttgccaggctggagtacagtggcacaaccatagttcactgcagcctctatcccctggcacaagtgatcctcctgtctcagcctcccaagtagctaggaccacaggcacacaccaccatgcctagctaatttctttttttttttttgtagtcatggcgtcttgctatgctgcttaggctggtcttgaacagcctcaagccctcctcctgcctcagcctcccaaagccgaggattacaggattataggcatgagccagcaagcccagtctagaacattctttatccttcctgttttcctcagatactttcactctttttttaaactttatttattttttatagagacagggtctcactatgttgcccaggctggtctctaactcctgggctcaagtgatcctcccaccttggcctcccaaagtgctggaattacagcgatgatattttcactctaaaaagatagaaagtatattgaccagcctggccaacatggcgaaaccccgtctctactaaaaatacaaaagtcagccaggtgtgatgtcacacgcccgtaatcctagctactcaggaggctgaggcgggagagtcactagaacccgggaggcaaagattgcagtgagccaaggtcatgccattgcactccagcctgggtgacaagagcgaaactccatctcaaaaacaaaaaaaaaaaaaaaaagagagagagaaaagaaagtatacttatgtctgtatgttaaattttgtagaccagtatggcagctccatccaccatccagagtaggtgccttccactgtgcatcactaaggacaggatttaactgcaagctcattacaactaaagcagtttgtttgtttatagtttaaagaggaaggtttggtttaggtggagcaggaaacattgcattagtaacatatttcttgagcattctgcacagaattacattagaatgtaattaaagaagtcaaatgagtttgtattttggggaaaaaatgctgaattttcactcctgtgtcattctgtaggatagtgaatattacaactctttgaaatggatcctggagaatgaccctactgagctggacctcatgttctgcatagacgaagaaaactttggacaggtacatgtgggtaaccctgggaactcttctttagctttcaaggggcatttttcttcttgacgggctgtaacacaactttgctggaccatcagaaacaaccagcaggagctgcaggtgttaattttcatctcattgtagcagcacctttttgtcatgccaagacgccacactccaattacaaccatttctctcttccagcaaagttacagaaattccaagaggccttggggcatgaaccagcacctcttctaatccaaagcaaatgtgaatgtttcatttgtgcctcggttttagaatttaggtacttgaaaaaatagtgagattgttgacttagcgatgtaaatacatgaccaggagtgggtgatgttggaagggccattggtttttctctctgttttatggttctgttgtcatggcgacatttgtcttgtgaggctcagcatggcaggctccggtttttctaccattccctctgctttgcccccacgctgttattcaggctggactaatcctcaaagtcagtttcagactggtcagcagggatttggatgggccactgaaagtggatttcaaaggtaaagttgcctgcttggaataattctcatcatgctaaggatctatgcgatgtatttgtctcaattctgaagcctttgcttcatctgccactcagtaataatgatgcagcttgggaggtgttctcaatgtattctctgaccctggtacctgtccttccgcaaaagcccagaggtatttcccatccttcagactaaatctccacggctatgaaattaattagaccatagaactcattgtaatggttgccctctgaaaaatgaaatagacgtgttctttattgctagatgtcaaagattgctagagaatctttgagaaaagaagctgatgccactagaggatttaatgacaactgagggtaaaaattgttggataagaaaataatcacattaatatcagaatcacttgttattcccatgtcctgtgtttgagccaggagagttcagtctctagtgtgagtcctggtgtgggtggaacctggggagtccatagggcccttcagtggctaggcaaggctcagagaaggacttcaggcaccagaggcaagagaccttgtggcttaatgtaaatgatcaagtcctttaaaaatctccttttgtgccccctccccactgcccccctttcccggcctcctccccaccccactgtgttgtgctttatgcctgagaatccttacagacaggcggacactgttctcctgcacggggaccttgtgatggggcagggaggggtcttttcagctgctgcccctctggtctccagcagcctccccaggaccgagagtactggtgtctccagccctgtctacctccttcctctgctgcctttgacacaaatagctcactccccccagagacacctgcaaggcacagtgcctttcactccgggctctcacccctccccactggtctccagtcccctggaagtgcatgctcctctgctggccctgtggatgcaggtgtcaccctgccagctgtcctgcacccgctgcttttttgtctcacccttgctatctggatttcctcatcctacctgtggctccggctgcacccatctccgctcaccaccagcctcttatctcaggccggcgtctgccttccagcctccagaattcccaggtctaacggcctcctcaactgcttctcctgagaggctcacgggtcccagtgctaaagccactttttcctccccagcccccacatcggttatggtctcatcagtgccaccactgtcccctcccacctgacacttgggcatcccctcagaatctccctctctcctcatgccatctcccctcctcatgccatctccccgtgcccaggcttgctgtgccccgtgactccccgtccttggcacgtccctgtctgtgcactcccctagccctgctccgatcacttcttgactgctgttctcacagcctcctgtcggccgccccctttcctgctttgctgttctccagtgccctgttctctagtgcctaccctgttctccagtgccctgttctccagtgcccgcctagctgtgagccccttatggactatttctgaaatgcagccctgaaaatgtccttcttctacttggccatcttgtgaccttcagcataaatgaaaactgttagcatggcatatgacccctcataatccagacctacccccctctggcattaccctctgacacctccttcctgtcaacctgtcaacaaacagtgtgccttcaagggtttccccagagatgcttcagtgccacattgctggctcgacactgcccactctgtaccgatgcattctcattctctctcccatcacctctttccctgccatcctcgaggtattgactgacgtgctgtgtgctgtatgccccctgaggtcttctgggtctctccagggctcagcatgtagttgatgcctgccagtgctcattgagcaaacgaatgaggagtgctaacctggcttattaaaaatatgaataaggtggtaagtaatagaaatcctaagtgtgagaaaacaaaatcagtcaagtcttggtggctttttttaaaaagccggacctattgaagggtcttaaactgccaattttcaaacgattagacatggttagtcaccctggaagtatcttcctttcatttttaacatatgaaggaaggagtggaagtaaagaaccaaggaagactgaaagtcagtcttgtgtgtcacatgcattaaaaaagtcttttcgtagattcattcatagaaaaccatatgaccaaattaacccaattcagaaaactattaagccacaatcagaagcaaatgatctgggaaaccttcctaattacatttaaatgtaattgtttccacctcataaatgaaagtcaaacacagggtgttggagtttttaagcaggcctctaataaatcttctgatgatcgttcaggccagattttcattaaaaacagttctcagacctcctcgtttaatgttgtgaattcttctgacttttgggtaggatcaagtagagtaatgcattaatcaaaacagacccatgagatgagtaagataagaattaggtgcccagtttgttgaattactgccttgcctttttgagagagctatcctgattaacagggaactcacgtatttattttgcactctgggaaggaatttagagcaagttaaatagctgcatatggatctcatctcccatatccagtccatcagcgagttgttcacacacctcccaaacctttctcatttctgtgcattctgccgatctcttctctcactcacacccaagtccaagctcccatcttccccactagacccccgacccgtctctacatccaatatggcttcttataatggcagagtggtctttttggaatataaaaatgagcatgtcattcctctgccagaaaccttcaggggtctcccctgcccttgagataaagaccccaaccttactttgtcccacaaggtcctgcgtggcctggctctccctgctcctcctccagactcactgtgaatcacaggccccactgggcttgtccaacacaagccccttcctgcctcaggccctctgctttctcttccatctgttgggagcatactccctcccagtctcagttcaggtgtcccttcatcagggaagccagcccttgacccagaccctatgcatcttccatgcctgccctgtggcatgtaccacagacgactttgcatttgtctgagtatgtttgtgtttagtgcctgtctctcctgctcagcttcctcccgatgatggcagccgcatgcctgccctgtgctcactcactgtcgtgtacttcccacaagcactttgcctggtgcatggtgggtacttgtagttgttgatgtggaaatctaggtgttagcatgatgcccggacaagcctctcacctctttggccctctgcaaaactgttgactctgacccagaagaaagcccattcctccccaatgccaaacagtcaagtcacttccacagtggggcaaagcaagtgcagttgtcatggggtgaaacagacatgcagtcagccttccacggtgtttcaaccttctttttttttaatttcacagttagaaatatcagaccatgaagtttggtagctgttccttcatgtaatgaagctgcagctgttgccattattttgcaatttgttttctttctgattggtaagaatctggggctgctggtttctagggcctaatatgaaagtttccactgaagaaatgtcagtgtttgaactatgatcctgtgccaagcaggaagaataagccgtacccccattcactgctgtgcacacatacctgcccccaccgggaggaggggcccttttagggctgtaacaagtgaaaattctttattgcaagttcagcagagcaacgtctaatttggttatgggtttgtttgtttgtttgttttttgagacagagtctcgctctgtcacccaggctggagtgcagtggcagaatatcggctcactgcaacctctgcctcctactttcaagcaattctcaatgcctcagcctgctgagtagctgagactacaggtgcaagccaccatgcccagctaatttttgtatttttagtggagacaggacttcatcatattgcccaggctggtctcgaactcctggcctcaagtgatctgcccacctcagcctcccgaagtgctgggcttacaggtgtgagccaccgtgcttggcctgatttgattgttttgaagagctgccagaagtttcaagaggctgtgcagtagttggagggagaccatgggcagcagccatataggaaggttctttaggatcgggtcgagccagtctccataggaatgattacccaaagggaacaaggaggacatcatctcagacattgaagtggttagtggccctcccagaagccacagcacattccacaggtgtactgtggatctctctgttaagatttcatggagagaggtgggccactggcagaaagaatctaaaaaggctctttagggggtgataatgaattaaaaggtagagaaacacttgggggaaggcagtgagtgaaaaggcagaaatggtcaatgagggagagggcagagcatgtcctggcggaagccaggagccagacgaagagcccggagctggaggtggctcccaggagcgctgaggccccggccccttcaggccagtcagggacacagaggggtggcacctggggagacgggaagtgggaaggctggcatggacttgctgcctccctgctgtcggtagttgcgctgctggagaggctggggaggatgaggaaggcctggttggtggagtgatgggggtgcagggtgctgactgcccccgaggccgtgccctgcaggatttgtgagcacccatcagtgggcgtttgcccagcagtgctccgtttccaagaatggagtctgacaagcagataagccttgctccacccaagtccagcatattccatatgagccaagctgtttctcagcagcttcccaggcagcgcaaagcatttatggagggtcagggagatgtgtgggaatcgggttgttaactggccaaggcagggagtcccccagaagttcctctgatctctgtgaggaagagagccaagtttatgctggggccagtagacttaaagaggaatttttctactgcagtgttctcccacgagctcttgctgagcgcctgctgtggctgggcattgtgttccttgtgtggggtcctccaggagcccaggcacaggagggcgatggcccagaaagccctgggagggcggggtgtgcgtttcgtggctgaaggtggcaagaatccaccccacagagcaggctctgcagactgctcaccagggagcagggcccctgggtgccagcaccagctccatctgcagttcgctgtttctccttggtcactttgctggatttctgcctccgggatgctgtccaccctcatgacgggggccagggcgctgccgcagcacctataggagatgcgcagggcagagagcagcccctgtgtgacgctgccccgatttctcccacttagggttgacactgtcacggtaccacccggtgttcagtgctgaggacatacagtccctcccctcctgtggtggcaacagctgatgttaagaagggacaaatttgggcgaaaggagaacacaggctgtagttagagtgatggtgagacaggaatgaaggcccgcagggaatctgtgtgcctggaggcgagcattagagtcagatagccgcctctccaacccccatggagcctcgtgcccaaccagcaaggactctggggcatcggccagtggcagtaagccagtgtggtgggctggacaatatgcctgcactgcaggagacggtgtcacgatcagcccccgacagccggtctcaaaagtggaatttgaagagtggtcattgcttctcatgaaagtgtcgccgtaactcatgaaagtgtcacctgtaacgaatcctagagggatgcatttctgtaccacggagggctcgagccgagacaccgagatctgggggcgtgacccctaacctagtagcttagggagcagaattacaaacccctcatcctgtgcccatccttgggccctctcctcactcccccacagagaaacccagggtcagaatcaaccatgagacttgacggctgcccacaggatgatttactgctgtgacctcatttagcatgggttagtgtgggcccattttttcttttctttcaaaaattatttatttatctaattataaaatattaacctccataataaaaataaagccagtataataaaaatatgtaaaataaataaatgtcacttattcccagtatctcaagaaaactcaggattaaaatttttatttacattttccagaattattctctgtaagcacaaaacagatttttttttttacagaagtggaattgtactctgcatactgttttcttttttattttatttatttatttatttatttatttatttatttattttgagatggagtctcgctctgttgcccaggctggagtgcaatggcatgatctcggctcagtgcaacctcagccccctgggttcaagcgattctcctgcccaagcctcctgagtagctgggattacaggcgtgagccaccactcccagctaatttttgtatttttagtagagatgggttttaccatgttggccaggctggtctcgaactcctgacctcgtgatctgcccacctcggcctcccaaattttttttattatactttaagttctgggatacatgtgcagaatgtgcaggtttgttacataggtatacacatgccatcgtggtttgctgcacccatcaacccatcatctacattaggtatttttcttaatgctatccctcccctagccctccaccccatgacaggccccggtgtgtgatgttcccctccctgtgtccatgagttctcatcgtttaactcccacttatgagtgaagctggaaaccatcattttcagcaaactaacacagaaacagaaaacagttttcaaattaatatatcacacataccttttcatgtcactgaatatcagtctataacattctaatgactgtgctgaattttactttgtagacgtgccatatatttttaaccatgccctgttggtagacgtttaggctattttagtattttctatataaacatataattctgtataaccctggaatactcacatatatacataatatatatagcatacaaatgtataatctggaatatacattttgtgtacttgactaatttttttccattgctataaactccaaaagagaaattactgtgagaagggatatataattttaaaattgtgatgcctattgccaaattataatatcttcagaaaaagattgaaccaattagactcccacccacagtgaaggggagaaccagttctctgcactcagcaacactggcttattttctctctcatccctgggcgctgcttttggaggaagcagagtgttttcctccttagccctcccctccccactttgtctgtggccgacccgctcattcagtagctctctggaaattacaactttcaggcaacaccaaagaaggctctgtgatcaaagagagagggctggatgaatgctggaaggagtgtattacagggattgtggatgcttatctacttgacctccttccccttccctgtgcgaggggaaagggtgggaggaaagattcggcttgagtgtagccgagctgtaccgaaagccttctcgataccaatgcctgggctgggatttattaacttgtcattgacgtggatctgataagaaaactcttaccgaaggaacaacaaggcagtctggggaggaataaatggggaaaagaagaaaagccaacctgggtttattaacacatagaacaaaaggtatggatgagcactgtccacgcacctctgagaaccagccacgaactggcagagtttcactgtagaaacatccccaccccacccccaagtggaagctgtttggcatcctccatccccaacacggcctgtacggggcaggagcagatgacccctgggagaaaatgggatgcactgggaagatggcagctagaaagggaaatggagaaatgaaggatgtcagcaaaaccggaaacgcagcaaagggattaaaattcacattgggcacagtgaagagttcagttgactttgcagaaatggaaagcatagtggaaaaatgagattccttcctgaataaagagaaaaagagaatgtcgagggaccggatggatgatgaatgtgttttacgttgaaaagccatctcagtgtgaatgggaacaagagccagtgcgtggagaagccgcatgagagacccaggtgtgagtgctcgggtcagaggggctcaggatctcctgggtgcaggtggcaggaccaaggaacccctggaggtggcctctgccagggcatagagttcatcacaacatggaacctccatccctcctgggtaccaccctaacacttactttggaaaaccctctcccctggcttggtttactctataatgcaaccagcaggcagaggaaaaaagatttagagggaaccccaccaaaatagtggcatggctttctttcagtaggagaggtgtaggtgctatatttttccaccttttttccccaaaatttctacaatgagaaaaaaacattttattttaaaatagtaggcctctctcccttccctcacgctggttactgtgctatgtggccttatggtaagctaggtctgggtcagggcataggagaaagggctgccctgattgcagctgcttttttcatgatcatgggtggtgctaagggaggaagcttcagggcagatgagtgaggagaaggcgtccaatgcaaataaatgccttcaaaaaccagataaatctgtctcttcagcctggatccttaagcttctttcttgtctttaagtttctgtttgcatttttgaaagaaataccatgcatcctttttttatgactagaaaatataattttcagaaacagaatgcattagaatttggatttctggagtcttgatgggtgtaccctgttcttttctctgttaaacataattagtttcctgataaatgaatagcagaggaaaaaatgttgctcttcattattgctaatatatgaagaataattaaaagtcataaataaccataaaacaatttgcctttaatgatagcatctttaactgtgtaacatcctagcaaaaaagcctcattggacattctcttgtgcacagagcccatttgccgggaaatatttctgaatacatgttgtcttccctttatagtaagacattgtcactcaataataatatgcaagataacttcgtgatagtaattgttgttttgtctttgtaattacagacatatcaagtggatttgaagcccaatgggtcagaaataatggtcacaaatgaaaacaaaagggaatatatcgagtatgtatacacatatttactgccttttctttgaataattgaaatgcatgtttggtcactgtcccttgctgaaacagctcatgcatttattatgggcatgagtttattggtcagttttcaacaaggtaagttcttttctggcttgggctaatgggaagttgaatatgggatggaaagtctgtcttgtatcatgactccattgagctgccctataaaggagcagaggagggagaaaaggtctatattattgagtaatacggcaaatactcttttggaatatgtggatatcaactaagatttagaattgcaacggagaaccacggtgtcagtgaccagcagggcaaaattaggaaccaacaaagaaaaaatattttgtctctctcccaacttcttttccataatagaaatgtatagaaatagttaaaatggataggaagaattcagcatgtgcaaccctaaggaattctttctggtatttgtaatattcttaactcaacttcagcctcagtggaacaaaatgttgagtctttttggaagtctagctgttaagtgattctaagacatttgtaccaggcagaagtttttctctgttgggcacgttacgttttcttttttagtgtatatgtgtgcttcaaatgcataactctgggatcttccaaggagatcccctggtgcaggggtgaggtgagcactgcagtgtgtggttcctggcacctggtttctgctctcttgtgggtcgccacagtggccctgagttcctcgtttgcattcagtgcttcgtttcaacaggctaggctccctcctttcttctcatttggaattggtcagaggtcttgaaatcagacagctcttgcattgactgtgggtcttagcacctttcagtgtgatctgcaaagaaaaacctactgtccttcctaattaggaagaaacggagcgtgttagagtctctactcagagatcctggcaaggagtggaactattacatggcggactcttttcactctcaagttgaaagcttgttatgctgaatacatagactagaaataaggtacctcggttcttacctggccacattaattggcactctcgttctgaatatgaacaatcttagctgatgacatcctggcagacaccattgtcttccttcagaaagtacagactgtgagtggggtttaaaaaatattctagctcagggtgacccaggtctcaagtctgaggactctgacatgcgtggtatgtgtcttgcatcattctttgcagttaattcttttagggttcaaacgtggtgggagtcagggccaggcagggttccagctagctttacttttaaaagtataattgaaatcaccaactgctccctgatacctctgctcccctggtgccagaagaatgctgttgagctgttcattgtagcccaggaggtgccacctgagaggccgcacagtggttgtgctgcaggctggtcctcagggccattaccatggttacagtgtaccaccccgaaggtgagaacccttcagaatgatggaatgcctgagatgacatccagagtacatttgccttgcgatcagttttgctgtgcattaaacactgtcgcagggaacttggttttggtgaacttcagttgcataaggaggtcttaccattcatcctctaaattttggcattaaattatgagtgcaaatcattttgctgataaagcttatatgttattgttgaatattagcacattggatactagaatgaaatattagataactaaatgcattgtcctgagtacactttacaaatatgtatacatatatgtgggtgtgtatacgggtgtgtgcatcttatacatgtatacctgtgtgttcataccccatgaacttttcccttttctccatgttgtcacattttaaagcagttaaagcatttaaagcattttaaagcagttaagcatttaaagcagtttaggtcagccaaaccttgatgtgggggaagttaattactcttttgaaatctccagtgagattttaggtttttcacgggtgttccagggagtcttgaaagaagccatgaataaactaaacagtgggggcacagaggagaccctcccctctgctctgctgtcgtggatggaggagaagcactccctgttgcggagaaagcagtgagcactagtgatgatggaggtggttcaatattgtcctcttttctcctgcagcttagtcatccagtggagatttgtgaacagggtccagaagcagatgaacgccttcttggaggtaagccatgctggccagggttctctgccatgtgcctctggtcccgggtcgatgggggatcgcgcttctcctttagctagtgtggtggagctgatcagagacagaggcgaggctggggaccctgcaggaagaccgggatcgcacagctcacaccgctggccagtctccagcacaagagtgttcagccaccgtgccgccacctccttttccttttcacgggttctcctgcttgacttctcttatttttacatttgtcctgtttttaaagaggacgttttacagacttgatctagaaccattgtcttggagtttcaggcggtacccaagagaaggctgccttttgctgcagtgacaggttccaagaagcccgagggctcagagctgaatgatgaagcgcagtccccaaagtgcctggccacccctccctccctggatcactgctgcctgggcttgattgattgattgattgattgattgattgattttgagagagattctcactgtcacccaggctggagtacagtggtgcgatctcggctcactgcagcctctgcctcccgggttcaagcaattctcctgcctcagcctcccaagtagctgggactacaggcacgcgccaccacacccagctaatttttgtatttttagtagagacggggtttcaccatgttggccaggatggtcttgatctcctgacctcatgatccacccgccccggcctcccaaagtgctgggattacaggcatgagccgccgcgcccagccatggacatttttttttaatcccctgccctttttctttgtggcataattcattgcaggttctcttctatacagatacatggaaaacacattttcttaagctgagtttttatttattttatacccagccacctcatgacagcttttaccctgttacagagcaaagtgggcactgcccagatcgaacttttaatatcagggatgctcccaggcccctagcagtgggtgagggattcatcattttaaacagtattccacttggaccaaaagcaaaattctttcttaaatatgatatagtattagttacctcaaagatcacacaggaaacagcctcgtgtccacgtgactgattttctctgcactgaggcagagctctcgtggggtgatgctttcccttcactcaggtacctacacaggatgcgtgaaagcccgggcagcacactcagaaacagctcggggccttagggacttaaaatgggaggacagaatggcaggtttcactctttatttagataagaaatcccaggaagcagattcctgggccccaccgcaggcggtccacaccttcagaaacgcggcgttcgcagcgcgcagggcccagcagagctgagctcatcctagatcacgccacagttagtggtacctgggaactggagcatggttttctgtacgcacagtgtctgcacccatcacctgcctccctctgtgtttcttctccctgcctccagcacgttatttttaagcgtgtctcttacacatctgtagcctgtgcatcttaggacgcactgactcacagcagtgttataaatggcttttggaatccaccctgcctacagtatcccatattttcatcaggtttcagaaattactccactacttgaatcttctagattctatgctttttcgaaactgttatattgtgactgtgctgtttttactggaactatagttacttgatactgtcactgacataggaatcatcaggagagattatatttttttctggctaaccagaaaagtttgtttttcctgtgaaattttttttttttgaaggcaataggtgtttaagatgttttttttttttctttcagggattcacagaactacttcctattgatttgattaaaatttttgatgaaaatgagctggaggtttgtattataaacattattttatgtaaagtggattttttaaagtatctctcattactttacaagtaatattttaatattcttggatccataatgtcctagagagtaactttagatgaattatattacatgtctcttatagggcttatttgccaatgtggttctattacatgtctcttatggggcttgtttgccaatgtaggagtaaggaacagcaaaaataatcagctgtagttgccttgtccatcagagggcagttctggaacatgcctagtaagtagaggccactgagcagagctgggatcatggccctatgcaccaggcgaggcaaattgccacaacaagtagaaacaaggtttgcagtagccctctggacagcagaaacctgcttacactaccagactggccaagtatcctctgctgcatccccatccacccccaccgtggcagccaaatgggggtcttggccacaaggtggccgtaagcatctacttgggcctgtagaacgacgtctcattgaacttgaagtggtttatgttgagtgaggaaaaatgtcagaaggcaacagggttgtagcaaaaggtagtttagtgattgtctagttcagcttcttggtgttgacatagttgagtaacagccattttaaaaacaaaggaatatctcgccctttgttgtgtcgagagaaacaggggaaagactgtctgttgagaagccgttggtgggactcggccatttgccccgtccatagccagtgagtgtttcccatacactggccttctatacttttatctcaaaacagaaagttcaagatcgatgatgtctatagaaatcatatacctcaagcctttcctctgataggtgggaaactgaggcagagagcagctgggtttacccagcaaggttttggcacggtcaggcctaggaactttatttccaggcttctggcttagttctgtttccatttcattctggtacctttgcataaatatcttccatttgtccacaggaaacctcccctgatggagagttgcataataggaacggcaaaccttagactaaatgctaagtcgaagacccagttgtgccttagcgtatgtctgccattcttaggcctctgggcagatgaggtgatttgtcatcactggaattgatcaacctggaggagagtcataagcactaattcttttgtgggtagggagatgcttttagatattcagaggaataacctctcaggaggagaagcagccagggtaatgcacagatgctgctggagcgtgagagaatccacaggtcccatgcgtaagactagaggggtagggaggacgactgtggcatttttatatccgatacgacatgccgtggcttgcgcaaggttcgaattgagctgccctcgtgactgctgcctctgtgatctgctatggcaggtggagcctggaacaggtgtctgccttcctctgttgttatgatttgctagcttaccttcgcggcacagtgaccacatgctggcactgagggtggtcatttctcagtgtgtgatctcgcacctttcacatcctgcttttacatctggtaaattttcttcctagttgctcatgtgcggcctcggtgatgtggatgtgaatgactggagacagcattctatttacaagaacggctactgcccaaaccaccccgtcattcagtggttctggaaggtaactccggggcccagccccagccggtgtcctccacctgaggcaggattgagggctgtgtggcgccctccattgtggtctgacttcaggactgatgctggctttggggtctgttagagcttggactgctgggggagggaagaggcaaactgagccagcagccccgtggtggctcctctgtaactgtagcagacagctagacttgaatgaagttggtccctacaaaagcacactggccttccttgaccacctcgtgaaagtgacttttatttgagggactggtcctccaatgcgtaaatagaaatggggggcttctcagggcagaaacaggcttcagggatggctttgcaagatgccactttctgttaagaagtcgttttctcaatttttaaaatatattccaacaaatattttgatctgtgtatctttcaaccaaagataacacaacatttgatttattatcttagggccactgtttgtatcctgttcagcttaggagggaagtaaaataggaatgggttagtccaaaggagatatagtaaacaaacttaaaaaaaaaaaaacagttatcccccaaaaaggctgattatttacttcaccccaaaaaggaatcatttaactttttcaaatttatttttatttatttatttatttattttaaagatggggtctcactgtgttgcccaggctggattcaaattcttgggcttaagcaatcctcctacctcggcccctcaaagtgctgggattacaggcatgagccaccatgcccggcctttttcacatttctaaatgccttttattactatttcaaatgccagcaggaatacagagataaaaaagcaaaatcttcaaagcctagtccaggtctcacttggcttgttttagatgtttgcctacagcagtccaagtggcattaccagtaaagccacctggattcccataataatgcagatatgtaagatacacagattattttagaaccccatctttgcctttgttgttttgtttttgttttgttttgttttgtttcattttataaaatgatgtcttctagggaacgtgtctacaatctgaaatcccatctcataacctggcttccccttgtgatgacaaatcttaaatactgtatatttataattggcttagggggaactggtaagcctcgaacacagaaacatgagcttggtgccatcagagagtttgctttttatatcatttattttggcctattggcagaagaagaaagagacggacattgtgatcactcagtctcttagattagagaggccagctagtattgtggccataaaaaacctactcagttttcagagtcaactgtctaggtcttacattgcaatataaataagattaagttctgcctgcctgcatgacagcagcatgtgccatgggtcacgtggggggtataatgaccttctgcctctgttcataggctgtgctactcatggacgccgaaaagcgtatccggttactgcagtttgtcacagggacatcgcgagtacctatgaatggatttgccgaactttatggtgagcaggataccattggattcagttgtcctcctgggaatttccagccaggcatgaactctggcccaagaaccctgccgccaggcctctgcagaaggctaagtttcaggacagtgtgccatgcataggttccatgaaagttcaatgaaagtactgttatctatactttatatagataacatggtgcttctacttcgagggattggggggcagtttgtgaagaggtccataaggctgctcttttttttttttcctagtttagttttttagtaaatcgttaaaaactaggttttgtagggtcatttatatggtcgtaaactgaggtataaagtcacctccagtaggcagaatttttcagtgtttaccatagatttaaaaatcactctgtactttgcatactgaaagtcacatttcattcaccctcccacccacaaaactagtttgaagtttaaatttccagggcccagctgagaggctgtagctgcctgcctttccacgtaactgttgtgtttgttaatcttggtgcagttccattctggagactaagcagagtctttctgtgaggttgtgcagacctctggcttccctcaacattaaatatcaatgttgcagcagaagagagtgtcttgggcctcacccctgggggcaaaccctgccctgacagtagctggactgcagaccacaccatagcttcattcttctgccccaagcaatcttaacatttctttttcttttcttgtctaggttccaatggtcctcagctgtttacaatagagcaatggggcagtcctgagaaactgcccagagctcacacatggtgagtgacaaaaacacatgcatgtcaatgcaatatctgaactgcttagctgggtatggtgctgggctcaaggctattgaatgctctgtttcctgtctgtaagtagcttagagaattaaaggacagtgatgtggatgaaaatagaaattgtacagtagtgctaataagacataatgcactcagtatgtttggcacataaagggctcaggcctccctgctgtggggaatttctcctctgagcccagtccttccctcattattctaggtagtggagctttcactgttcagcatacatagataaggcagctctcaacctgtataataaacacgttgggtttttactccaaccttaaattggttgagaagttaggacaaaataccctgtagaaacatcctttttcaaaggccttctatgcccatgaataacctgtaattccctggaattgagcagtaacatgactgtggtcggaggagggtaagagggctgacacgtggccagggatgcccaagcgtggagcgtggctgccctcagaaggccctctcaggaggcacagtgacgcagaagggtcccagttgttttctgaacagttgcatgaaacccagcacaaatgcagactggatgggatcagtttcttgaagccgggttcagggagctcttgctaactcaaactcccatgtccctcgtgttggtttttctgcaaaggcctttatttcttgctcctgaggaagcagcagaagtgggccttctggaaaacggtgagcagcgtagccctgtgtttctcatgcagcgggggctgcaaagcctgctctggccatagtgagctaacataagcaaccaaacactccctgcaggaaacgccctcccttacactagaagtgctggccaggagagaattctcatgaacatgtgtttgcgaaaaattggctgtgaaaggtttttcacttctgtcggattcccttgcctcaccagaaaggtgttttttttttctattcgtaccattcacgtgactctccagatggaaacaatgtggtcattgcctgtcagagccttgaaagcaagctgactccagcctaaaattcatgaatattcagagcagtcattgtccgtggttctctggctttattctaagggaagaatgtttgagtagttcagagcttttatccaaatggtgtccaagtcatatgtggttttctgggttctactggcctccatatgaaggcaccagcgttgagccaagccccaggactgtgggtggtgatgcgaaactcaagctcataatactaaccaggatgaagattaggaaaagcgaaattattgggcacagtcatcatctgtggtcaggcactgcttaatctttatggcagccttatgagatatgttattcccttgggctgtcagaaggctggcccagggctcaccagagtcacagattcccagatcacaggatttgaactcagagctaccagaattagagcctgcaccctttaccactacaccagatacactgcctctgttgatatacccactttctttttagacttttccaaggaaaccaaattagtgaaccaatttcatgttcattcagcccatgtttctctgtgacttcagggacacatatcttactattgaactgtcttttttatttcggagcccacatgattctgccacaagtagaacttcccagataagacctctgaactcagtggttctcaacctcagctgcatgttggaaccatctagagagccttaaagaaatcactgatgcctggaatttggacttcattggtctggtgtgtgacccaggcagtgggattttcaaagctccccagatgatttttataggctggcagggttgaaaattcacagctcttccctaggaagggcaaagatccacctacaggaagggaacaacccagctggctcttaccagaacttattttcctctttatgtgtcacggaaataaagcaactgtgtagttttcctaatgatgttctccccagactaacttgacccggatggagaggactggcagttgcaagcaacactggctagcatgagtgggactgttctgctgtttcttctaaatggctttcctccctacctgaccctgactgtattttgacataggaaacagaaacttcactggctgtttcgtggcaacagttctgccataaaattttgccatacataggtttaatttcttccacgttttatgatacacaattaaagttcagaataaaaatctgatttcctagaagagcagaagctgaaggatctggttctctgtgatgagggtacctttcattaagctttccaatggtgattattgagtgtctgacattcaaaggacttcatttcattgttctataaaaggtcactactcagacatttaaaattactcttcattaagaatcacaggcccacctgcccttttaggtagactctaaagcaaacaaaaatcatctcgttcagcccatgcatcttccacgtgaggacgctgaagccctgtgaggacaatgagctccttaaagtcacccagctcattagtgcagagcaaagccaggtccgtgtgtcctgacctctgaaatgataggaactcacactcaccaagcactctgttcattccggggatggtgctcagcacttgatgcgattgactcataccatcatcacagtggccctaagaggtgggtgatgttatgacccacttttttacagataacactgggatgcaaagcggtgaagcattaagcagcatgattcagaacctcagatcttgacatcccgtctttgcctctctcttcatcatgccagtgtttctcaaacctgaataatctgtgcaccttttttaaagggaaaaaatggtcacagattctcaagaatgggcctgagacccccatagggattgcaggcccgggactgtgaaaccccagctgaaaagcctgaagccactttcggtgaaaggctcttttaaatgccatctgtagatgtgaagtcctgtctttattaatatgataatagaaagttaaaagcctgtattagtacttgctcttttaggattcctgggttcctgagaaccccagtttgagaagcacagtgttattctctgtcttttagtgtttagtggctgttagagaatccaagtggaactcagtgggacttattcaatatttagtggttgttaaacggccctctacggtatgtgtttcttttctgttgctgtgacaacggttagcttttagtatatgtgcaagtgctgccaaagcgagcacgtgaatggttagcttttaaaacccaagaagttactttgctcattcttggaatcacacatcaatacctggagggggcggttttaaacacagtttgagcactcgcggcagaggcagcacaagtgcacttcaagagctgggctttggagcaccccagggctgtacctggccccgtgtgaccttgggcaagttacctaaccttgctgtgtctcaagctcctcctctgtgaaataggggtgaagcattagctgccttacaaagtgattgccagggttcataacattgagacaaggctgatggggcatggtgagcactccatgaacatgagctcttacgtcataatgagctgtggcaagtgtgcatgccattttcatgacagatacacatcagcaatcaccccccaacacatacacacacacacagaggtgcaggttctgtggctaaaggctctggtcttgagccccatgtagacatacagtaaatgttgaaaggtgttaacactgataccatctcttgagtaattgagcccttgctgtatgccgggcccactgatccgatccacttggcactcatatgtgcagtttccccatgtcacagaagcacagaggccatccatttgtctgaaaaccctcactattgccagggcgatttgcagcccccgcccccacctgaagcctccagatatgtagggactttttctaaatgcaactttacatagcaaatgtcaattttgcctgactttgatcagaggaggtagcttagcactggtgttcccgagccccggacagcctgggttctgtttgtgggtctgccgtttgacaaagactgtgacctcaggaaccttgccctatgtctctgctccaggagctcctgtgcagaatggagataacatgacctgcttcatagggttgtgatgaaaatgaagtgagttaatagggagaaaagcacttggcttgaggcctagtgtggaataagtaatagtattagagatagacacagtcttaattcgtgggtaactccaaaagcatcagctctgtgttccaagggtttggaaatcttgccggttactcccttcccaccaggattcctccgagatctgcatctgactatagcaaaggtttcatggaccatttgaaaatgttctttctctgtaaattacaagagcttatttagtgtggatgtttcatagctagaggtttttggggtttttttctccaggtaatcaaaattgttggttaaggcttttttattctcttactcaaacctcatgccctattaaccagatcgaggaagtgctgttgtggcttttcacctacactttttgttccttttgcagctttaatcgccttgacttacctccatatgaaacctttgaagatttacgagagaaacttctcatggccgtggaaaatgctcaaggatttgaaggggtggattaagcaccctgtgcctcgggggtggttgttcttcaagcaagttctgcttgcacttttgcatttgcctaacagacttttgcagaggcgatggcagagagcagctgcaggcatggtccctggagccgagccttcaccacgcactcgtccaagttcggatgcgggaacctggtcccagcttgagttcctgcctttcccaccacaaattatcaactggttgatgtgtacactaattacatttcaggaggacttaatgctatttatgttgtgcctctgcaggcaaagcccttaataaatattttacatcctttctaatgacaatgaatggaattaatcactcaacaggtatagtattacgactcatgtttactttttaaaatgatttagaccgattttcagattttatttcgttatgattaaagatgtctcatgtacttggaaaagtgagcattttttttttttttgtatttcactttcataccaggcttaatgtcaatgacatttttatttttgaagtactctgacacctccaccctctactttattagaattggaaggcaaatttttgtccaaaaacctacagacaagtactttgagagaatttccaatataatattagacataatgataattttttccatactcagaatgaaaaactggatattacgtttttgttttggggtttttttgtacaaatttagctaatagctacaggctgagagaattgtaacatagcatgacaaattttgtgttgacttgaaaggaatcacaccattattccttagaagtaattacatgtgttctaacacatttgagacagggttggactcccatttctcatccgagaaattacttaacccttcctggcgctgtacagtcatcttttattctatttcctctttgctgtttgtagtagagacattttgaatgaaacttggcactgcttgattcaaaactgtggaaaccagatctgtttagtctcctgtttgtatgcgtttgctaatggtagctaaataaccagtttttgttgtaaatgcaccaattctgaaggcactttatgtactacatggaggtcatatctggttttgtttttatttttttatcatgaacattaaatgtgatgatgatttcttttccctgcacacatctttccggtgcaatatctatcaattgtgaatctggctgctggtgtataaaaacctggatgtaaagctgagcctacagacctgtcctcaccaactgttttgtgatttctactcaactacaaagatttatttaatgtactcttaatctaactgagttttgttaccaatgacctgttgcatgcttcaataccgtgtactgcctgagttgtgcctcttgtgtgctagattaaaagtgagacagagacttgacttgatcctctgagctcaagctattgagctggtagtggcagaggactgagggtacctgcacagtttgattcttttccacgtgtaagtctccattgcagaattgtcgtgctttgagaaaacacctgaggcagtgtgggagttgaacgaccctgctgtcctttttaacctgtgttgtcctagaccctgtcggggcagtcaggggacactagagatttgatctcatgcgagtcatcaataggacaaaaaagttgtggtttggggaggtctgtttgttacataaaaaggacctttcggtgtaagaaattgccgtttttaccctgccctggctggcatgtgagaagccatggaaggttgtggttgtaaatgagttgtctaaaggggtgcagaggcctgaggtttctaaaagaaggtagatttctacagagctgagtgttggttcctttttcttattggttgaaaattacctggtagtgatcagaaaacttagatgctatgtaactaaaaaaaaaaaaaaaaaaaaaaaaaaaaaaaaaaaaattcccgctcatgagttttgactattggtgagatgttttccgctacagttaacatgacaaatgtctcagtggcaaaaatcccctttttgtaagcccccatagtctagaggcagttttctttttaagaatcatgccagagcctgagtcgagcagtatgctttcttggtttttgagagtaattgtgtaattgtagagggagaaatccaattctaacctaagaactgggattcttctgtcatcttgtaaaccgtatattgaaaaaaacagaatgtcactaaatgcatattaagtcaagtattggaaagtataaaagaaaaatcattctgacaatttctaagccagaagcaaacaagaattactgaaatctaccccatgaatacttggaaggcagtaattgtgagtgacacctcagttcatcaaccccttaataatatcagcttaattttaatgacaactaaatatgctgaagtgaggatttagtattttttaaaaaagcaaaacaaggttcagtagtcctcagcaattctccaagtttctctctttgcctaaaatggtcatagatcttgatttctctgaatcgtgatgaccacacccagtcatcttcacagcataattgcaggtggcagtaaagagagtgtgctgggtaaggagcagttgctgggtcattccttgggccccgacctgcccggggagtagccctgggggagagagggcagtgttgcctatcccagaggtcccagcagtcacactgctctgcaggccgggctctctttatagccagagaaatcaccttaatgcagtctctttagttgtctgctgaagctgtagttattatgggccacttacatgaggctgagaagtacgtgccggagctcacacactgcctgttgcggttctcttaacatcagttatcacagctgcctgtgggtcccgggtatttccattcctgccccttgttggcccgaggaaggatgtggaaagagcacctggtgggatgaaggtccaacagcctgtgcctctccactgctggccctggagccggcagcagtgaggcattcattgtctgtgttgcggtgtattcccagcttcagtgctcttttcctttttgcctgaaatgtttatgcttctctgcagccagtcctctaacaaatctcaagaacaaaggtaagacacttggtttttgtttccaggacccttcagaaggtgacatcagatattccctaaattcagacaatgagggatacagagcgacttggcatgtattatttctcccatgtaaggacaaagggacagattattattgttatttctgagacagagtcttgctctgtagctcaggctggagtgcagtggctcaatctcagctcaccacaacctctgcctcctggcttcaagcgattcttctgcctcagcctccccgaatagttgggattacaggcacccaccaccacgcctggctaatttttgtatttttagtagagatggtttcaccatgctggccaggctggtcttgaactcctgacctcaggtgatcctcccgcctcagccttccaaagtgctgggattacaagcatgagccaccgcacccggcctcacagtgacagattctgagaaacagcatgcaaaacatttgaaccattttctacatctcccattgttgcatagagagtgtgcaccgctgctatcttgccagatccacactggtcctcccgaaagccaggttcatacacagcaactttttaattattctaacagttacccattaacagtcgactcctgtatttctgagagtcttgtactcacctctgaaatttaaaaacgtataaagagagcctgggttaatcagttctgcagcccctacgtgacactgtgctagttctccttcttctgtctcctccttaccctggccctgcacccctgtacttaagagggagaggtgggaggtgctgtctggtatcatttgctgcctcgccagtagagggtgccgctgtgcagggtaactgcccgcctgctcccttcctgacctcccctgaccccgaagatcactacctctgtcattcaggcattggggtacatcctgataagtcgtgtcagaactgccaatttcaggactgagatgtgtttttaaaaaacaaatccttataaactccactttgtactttagattttaaaactggggaaaaatgtgatattctttggaccacttttttaatttatataagccttaatgaacagtgtctatacatttgcatacacacacccccaccccagagtgttctcagtatgtcagagaaagtgccacagcattaggacgggagcttggagaacgttttctagaaaagggttagcttcctgttggcatgaaattttccaagcaaacctcattaaacatctgttgtttgttaaagatgttccactgaaagcaacgcatgtttcaaaggcacgtctttccgttcgttggttttctgtgtgtaaggagtagcattgctgttggcgcctaacctcgcgtgcactgcattctcaaccccgtaccagtgcatcatcagaagccttcctcgtgaccataactctgtgtctgcagatatgtgttcccgtgtaagccagttttccccttttactcagactgatttcacctagattgtcacggtttccttcatgttaactttgcgtgactttgttcttcctttactactctgtatgtaatatatatacatatatacgtacatatgctgtccaaatatatttgtatatatttgtatagcatttttacacctttattgagtaatctggtttcgaaaggaggtgagagtttagtcccttctgcagttttctccaagctgtgtcctgtgaatttcaacccttggagcctaagaaaaccctaggaagatgatgttaatttgctgtcatttcctaattcaggatctatcatcaaatgaaacatgaaaaaaacagtgacttttaaggtgaaaagagtttcaagcattccaaataaattatcaatgtttcataactttttattataaacccacctcctaataggaagccaagtactatttgatacagtggtaaaaaccaaactaccttgaatttttttaaggcaacttatgaataatgctcattttcacagtcagaatagctttaaaatatggttgaatttgatacacacaggaagttttcttgaagaacaatcctttcgcttttcttttttcttgagagatctaaagagaaactgtagattgttttcctgacagcaaaagactaatgtgacaaaatgaagtcattgtaaagaagcgatgcaacttgtcaaatatttaataaagaattatggaagctggaacattttctacatcaagtgttatgggttgtttgatttaaagcttctttgtgaatgcaccatcttaattgttgtcagaggggtttaaatgcctgcagatttatagtatgttcatttccttcatctccctaaaagcgccgcacttttaaaaacattaaagtctggcagggcacagtggctcacgcctgtaatcccagcactttgggaggctgaggtgggcagatcactgaggttaggcattcaagaccagcctgaccaacatggtgaaaccccatctctactaaaaatacaaaaaatatatatatatattagccagacgtggtggcgcatgcctgtaatgccagctactcaggaggctgaggcaggagaatcgcttgaacccgggaggcagaggtttcagtgagctgagattgtgccattgcatgcactccagcctgggtgacagagcgagattccgtttcaaaaaaaaaaaaaaagtctgcccaaaacacatggcttaagcctactaaaaggatgcacatttattcttatccgtctgctgttttgttcttttattaaacttgagaattactgattttacgtaacatttgtataatccatgttagtctgttcctcaaaaggcatccttgtatacctagccctcaacttgtgtgagagttaataagactcaataatgaatccccaagttgcttctcagaaaggtgctgtcagaatcccgaccgtgtgtcactgccctgtgcaaagccggtggcatttttcctcatgccatttcattccgctcagatcatctcagactcctggagaattttccctttttctttagtactgagcttcctcttgatgtgcttaacccatcccctcggggcagaggagatagctagcggggaagcaggacatcatttagtctttggtttcttgcggcttgtctttttccattaacagtagatggcatcttgccagaaagctgtccgcagcacttggaattcctgcctcctcctccagggttatgagtacacatgagaggcacaattggacagagtcactgtgaatatttatatgttctttcttaaaaccacacatggtggaacgaattacatcaatgacacagttgctagattaatacgcttttaacctgctctgaagtccaagactcattaggcacttgtgagatggtgaagcccctggtaaaagtgtttgcggtgagcatgggtatcctgaattctgacactagctttctcggggttggctctcagagccatgttcaaaggggttcctgaggtaagaacgcagaagcctctttctgggagagaacacttctcaaaacagcttccagagagctcaggctgtagaa

SEQ ID NO: 186 - protein, 955 aa, Homo sapiens
MATGLGEPVYGLSEDEGESRILRVKVVSGIDLAKKDIFGASDPYVKLSLYVADENRELALVQTKTIKKTLNPKWNEEFYFRVNPSNHRLLFEVFDENRLTRDDFLGQVDVPLSHLPTEDPTMERPYTFKDFLLRPRSHKSRVKGFLRLKMAYMPKNGGQDEENSDQRDDMEHGWEVVDSNDSASQHQEELPPPPLPPGWEEKVDNLGRTYYVNHNNRTTQWHRPSLMDVSSESDNNIRQINQEAAHRRFRSRRHISEDLEPEPSEGGDVPEPWETISEEVNIAGDSLGLALPPPPASPGSRTSPQELSEELSRRLQITPDSNGEQFSSLIQREPSSRLRSCSVTDAVAEQGHLPPPSVAYVHTTPGLPSGWEERKDAKGRTYYVNHNNRTTTWTRPIMQLAEDGASGSATNSNNHLIEPQIRRPRSLSSPTVTLSAPLEGAKDSPVRRAVKDTLSNPQSPQPSPYNSPKPQHKVTQSFLPPGWEMRIAPNGRPFFIDHNTKTTTWEDPRLKFPVHMRSKTSLNPNDLGPLPPGWEERIHLDGRTFYIDHNSKITQWEDPRLQNPAITGPAVPYSREFKQKYDYFRKKLKKPADIPNRFEMKLHRNNIFEESYRRIMSVKRPDVLKARLWIEFESEKGLDYGGVAREWFFLLSKEMFNPYYGLFEYSATDNYTLQINPNSGLCNEDHLSYFTFIGRVAGLAVFHGKLLDGFFIRPFYKMMLGKQITLNDMESVDSEYYNSLKWILENDPTELDLMFCIDEENFGQTYQVDLKPNGSEIMVTNENKREYIDLVIQWRFVNRVQKQMNAFLEGFTELLPIDLIKIFDENELELLMCGLGDVDVNDWRQHSIYKNGYCPNHPVIQWFWKAVLLMDAEKRIRLLQFVTGTSRVPMNGFAELYGSNGPQLFTIEQWGSPEKLPRAHTCFNRLDLPPYETFEDLREKLLMAVENAQGFEGVD

SEQ ID NO: 187 - DNA, 1080000 bp, Homo sapiens; identical to SEQ ID NO: 185
  CDS (999562)..(999608)
  full length exon 7 range is 999547-999608
  CDS (1000354)..(1000456): exon
  CDS (1002118)..(1002284): exon
  CDS (1006117)..(1006249): exon
  CDS (1007860)..(1008036): exon
  CDS (1010940)..(1011014): exon
  CDS (1018160)..(1018291): exon
  CDS (1018800)..(1018919): exon
  CDS (1020028)..(1020225): exon
  CDS (1026659)..(1026736): exon
  CDS (1028113)..(1028167): exon
  CDS (1034316)..(1034374): exon
  CDS (1041390)..(1041455): exon
  CDS (1043121)..(1043350): exon
  CDS (1044868)..(1044989): exon
  CDS (1047519)..(1047589): exon
  CDS (1050296)..(1050391): exon
  CDS (1060368)..(1060441): exon
  CDS (1062648)..(1062708): exon
  CDS (1064561)..(1064620): exon
  CDS (1066207)..(1066314): exon
  CDS (1067768)..(1067864): exon
  CDS (1068609)..(1068681): exon
  CDS (1073289)..(1073388)
  full length exon 30 range is 1073289-1075279

SEQ ID NO: 188 - protein, 834 aa, Homo sapiens
MERPYTFKDFLLRPRSHKSRVKGFLRLKMAYMPKNGGQDEENSDQRDDMEHGWEVVDSNDSASQHQEELPPPPLPPGWEEKVDNLGRTYYVNHNNRTTQWHRPSLMDVSSESDNNIRQINQEAAHRRFRSRRHISEDLEPEPSEGGDVPEPWETISEEVNIAGDSLGLALPPPPASPGSRTSPQELSEELSRRLQITPDSNGEQFSSLIQREPSSRLRSCSVTDAVAEQGHLPPPSVAYVHTTPGLPSGWEERKDAKGRTYYVNHNNRTTTWTRPIMQLAEDGASGSATNSNNHLIEPQIRRPRSLSSPTVTLSAPLEGAKDSPVRRAVKDTLSNPQSPQPSPYNSPKPQHKVTQSFLPPGWEMRIAPNGRPFFIDHNTKTTTWEDPRLKFPVHMRSKTSLNPNDLGPLPPGWEERIHLDGRTFYIDHNSKITQWEDPRLQNPAITGPAVPYSREFKQKYDYFRKKLKKPADIPNRFEMKLHRNNIFEESYRRIMSVKRPDVLKARLWIEFESEKGLDYGGVAREWFFLLSKEMFNPYYGLFEYSATDNYTLQINPNSGLCNEDHLSYFTFIGRVAGLAVFHGKLLDGFFIRPFYKMMLGKQITLNDMESVDSEYYNSLKWILENDPTELDLMFCIDEENFGQTYQVDLKPNGSEIMVTNENKREYIDLVIQWRFVNRVQKQMNAFLEGFTELLPIDLIKIFDENELELLMCGLGDVDVNDWRQHSIYKNGYCPNHPVIQWFWKAVLLMDAEKRIRLLQFVTGTSRVPMNGFAELYGSNGPQLFTIEQWGSPEKLPRAHTCFNRLDLPPYETFEDLREKLLMAVENAQGFEGVD

SEQ ID NO: 189 - DNA, 1080000 bp, Homo sapiens; identical to SEQ ID NO: 185
  CDS (723508)..(723516)
  full length exon 1 range is 723483-723516
  CDS (1000354)..(1000456): exon
  CDS (1002118)..(1002284): exon
  CDS (1006117)..(1006249): exon
  CDS (1007860)..(1008036): exon
  CDS (1010940)..(1011014): exon
  CDS (1018160)..(1018291): exon
  CDS (1018800)..(1018919): exon
  CDS (1020028)..(1020225): exon
  CDS (1026659)..(1026736): exon
  CDS (1028113)..(1028167): exon
  CDS (1034316)..(1034374): exon
  CDS (1041390)..(1041455): exon
  CDS (1043121)..(1043350): exon
  CDS (1044868)..(1044989): exon
  CDS (1047519)..(1047589): exon
  CDS (1050296)..(1050391): exon
  CDS (1060368)..(1060441): exon
  CDS (1062648)..(1062708): exon
  CDS (1064561)..(1064620): exon
  CDS (1066207)..(1066314): exon
  CDS (1067768)..(1067864): exon
  CDS (1068609)..(1068681): exon
  CDS (1073289)..(1073388)
  full length exon 30 range is 1073289-1075279

SEQ ID NO: 190 - protein, 942 aa, Homo sapiens
MEQGESRILRVKVVSGIDLAKKDIFGASDPYVKLSLYVADENRELALVQTKTIKKTLNPKWNEEFYFRVNPSNHRLLFEVFDENRLTRDDFLGQVDVPLSHLPTEDPTMERPYTFKDFLLRPRSHKSRVKGFLRLKMAYMPKNGGQDEENSDQRDDMEHGWEVVDSNDSASQHQEELPPPPLPPGWEEKVDNLGRTYYVNHNNRTTQWHRPSLMDVSSESDNNIRQINQEAAHRRFRSRRHISEDLEPEPSEGGDVPEPWETISEEVNIAGDSLGLALPPPPASPGSRTSPQELSEELSRRLQITPDSNGEQFSSLIQREPSSRLRSCSVTDAVAEQGHLPPPSVAYVHTTPGLPSGWEERKDAKGRTYYVNHNNRTTTWTRPIMQLAEDGASGSATNSNNHLIEPQIRRPRSLSSPTVTLSAPLEGAKDSPVRRAVKDTLSNPQSPQPSPYNSPKPQHKVTQSFLPPGWEMRIAPNGRPFFIDHNTKTTTWEDPRLKFPVHMRSKTSLNPNDLGPLPPGWEERIHLDGRTFYIDHNSKITQWEDPRLQNPAITGPAVPYSREFKQKYDYFRKKLKKPADIPNRFEMKLHRNNIFEESYRRIMSVKRPDVLKARLWIEFESEKGLDYGGVAREWFFLLSKEMFNPYYGLFEYSATDNYTLQINPNSGLCNEDHLSYFTFIGRVAGLAVFHGKLLDGFFIRPFYKMMLGKQITLNDMESVDSEYYNSLKWILENDPTELDLMFCIDEENFGQTYQVDLKPNGSEIMVTNENKREYIDLVIQWRFVNRVQKQMNAFLEGFTELLPIDLIKIFDENELELLMCGLGDVDVNDWRQHSIYKNGYCPNHPVIQWFWKAVLLMDAEKRIRLLQFVTGTSRVPMNGFAELYGSNGPQLFTIEQWGSPEKLPRAHTCFNRLDLPPYETFEDLREKLLMAVENAQGFEGVD

SEQ ID NO: 191 - DNA, 1080000 bp, Homo sapiens; identical to SEQ ID NO: 185
  CDS (999562)..(999608)
  full length exon 7 range is 999547-999608
  CDS (1000354)..(1000456): exon
  CDS (1002118)..(1002284): exon
  CDS (1006117)..(1006249): exon
  CDS (1007860)..(1008036): exon
  CDS (1010940)..(1011014): exon
  CDS (1018160)..(1018291): exon
  CDS (1018800)..(1018919): exon
  CDS (1020028)..(1020225): exon
  CDS (1026659)..(1026736): exon
  CDS (1028113)..(1028167): exon
  CDS (1034316)..(1034374): exon
  CDS (1041390)..(1041455): exon
  CDS (1043121)..(1043350): exon
  CDS (1044868)..(1044989): exon
  CDS (1047519)..(1047589): exon
  CDS (1050296)..(1050391): exon
  CDS (1060368)..(1060441): exon
  CDS (1062648)..(1062708): exon
  CDS (1064561)..(1064620): exon
  CDS (1066207)..(1066314): exon
  CDS (1067768)..(1067864): exon
  CDS (1068609)..(1068681): exon
  CDS (1073289)..(1073388)
  full length exon 30 range is 1073289-1075279

SEQ ID NO: 192 - protein, 834 aa, Homo sapiens; identical to SEQ ID NO: 188

SEQ ID NO: 193 - DNA, 1080000 bp, Homo sapiens; identical to SEQ ID NO: 185
  CDS (999562)..(999608)
  full length exon 7 range is 999547-999608
  CDS (1000354)..(1000456): exon
  CDS (1002118)..(1002284): exon
  CDS (1006117)..(1006249): exon
  CDS (1007860)..(1008036): exon
  CDS (1010940)..(1011014): exon
  CDS (1018160)..(1018291): exon
  CDS (1018800)..(1018919): exon
  CDS (1020028)..(1020225): exon
  CDS (1026659)..(1026736): exon
  CDS (1028113)..(1028167): exon
  CDS (1034316)..(1034374): exon
  CDS (1041390)..(1041455): exon
  CDS (1043121)..(1043350): exon
  CDS (1044868)..(1044989): exon
  CDS (1047519)..(1047589): exon
  CDS (1050296)..(1050391): exon
  CDS (1060368)..(1060441): exon
  CDS (1062648)..(1062708): exon
  CDS (1064561)..(1064620): exon
  CDS (1066207)..(1066314): exon
  CDS (1067768)..(1067864): exon
  CDS (1068609)..(1068681): exon
  CDS (1073289)..(1073388)
  full length exon 30 range is 1073289-1075279

SEQ ID NO: 194 - protein, 834 aa, Homo sapiens; identical to SEQ ID NO: 188

SEQ ID NO: 195 - DNA, 1080000 bp, Homo sapiens; identical to SEQ ID NO: 185
  CDS (999562)..(999608)
  full length exon 7 range is 999547-999608
  CDS (1000354)..(1000456)
  CDS (1002118)..(1002284)
  CDS (1006117)..(1006249)
  CDS (1007860)..(1008036)
  CDS (1010940)..(1011014)
  CDS (1018160)..(1018291)
  CDS (1018800)..(1018919)
  CDS (1020028)..(1020225)
  CDS (1026659)..(1026736)
  CDS (1028113)..(1028167)
  CDS (1034316)..(1034374)
  CDS (1041390)..(1041455)
  CDS (1043121)..(1043350)
  CDS (1044868)..(1044989)
  CDS (1047519)..(1047589)
  CDS (1050296)..(1050391)
  CDS (1060368)..(1060441)
  CDS (1062648)..(1062708)
  CDS (1064561)..(1064620)
  CDS (1066207)..(1066314)
  CDS (1067768)..(1067864)
  CDS (1068609)..(1068681)
  CDS (1073289)..(1073388)
  full length exon 30 range is 1073289-1075279

SEQ ID NO: 196 - protein, 834 aa, Homo sapiens; identical to SEQ ID NO: 188

SEQ ID NO: 197 - DNA, 1080000 bp, Homo sapiens; identical to SEQ ID NO: 185
  CDS (999562)..(999608)
  full length exon 7 range is 999547-999608
  CDS (1000354)..(1000456)
  CDS (1002118)..(1002284)
  CDS (1006117)..(1006249)
  CDS (1007860)..(1008036)
  CDS (1010940)..(1011014)
  CDS (1018160)..(1018291)
  CDS (1018800)..(1018919)
  CDS (1020028)..(1020225)
  CDS (1026659)..(1026736)
  CDS (1028113)..(1028167)
  CDS (1034316)..(1034374)
  CDS (1041390)..(1041455)
  CDS (1043121)..(1043350)
  CDS (1044868)..(1044989)
  CDS (1047519)..(1047589)
  CDS (1050296)..(1050391)
  CDS (1060368)..(1060441)
  CDS (1062648)..(1062708)
  CDS (1064561)..(1064620)
  CDS (1066207)..(1066314)
  CDS (1067768)..(1067864)
  CDS (1068609)..(1068681)
  CDS (1073289)..(1073388)
  full length exon 30 range is 1073289-1075279

SEQ ID NO: 198 - protein, 834 aa, Homo sapiens; identical to SEQ ID NO: 188

SEQ ID NO: 199 - DNA, 1080000 bp, Homo sapiens; identical to SEQ ID NO: 185
  CDS (999562)..(999608)
  full length exon 7 range is 999547-999608
  CDS (1000354)..(1000456)
  CDS (1002118)..(1002284)
  CDS (1006117)..(1006249)
  CDS (1007860)..(1008036)
  CDS (1010940)..(1011014)
  CDS (1018160)..(1018291)
  CDS (1018800)..(1018919)
  CDS (1020028)..(1020225)
  CDS (1026659)..(1026736)
  CDS (1028113)..(1028167)
  CDS (1034316)..(1034374)
  CDS (1041390)..(1041455)
  CDS (1043121)..(1043350)
  CDS (1044868)..(1044989)
  CDS (1047519)..(1047589)
  CDS (1050296)..(1050391)
  CDS (1060368)..(1060441)
  CDS (1062648)..(1062708)
  CDS (1064561)..(1064620)
  CDS (1066207)..(1066314)
  CDS (1067768)..(1067864)
  CDS (1068609)..(1068681)
  CDS (1073289)..(1073388)
  full length exon 30 range is 1073289-1075279

SEQ ID NO: 200 - protein, 834 aa, Homo sapiens; identical to SEQ ID NO: 188

SEQ ID NO: 201 - DNA, 1080000 bp, Homo sapiens; identical to SEQ ID NO: 181
  allele (827008)..(827008): the 'n' at position 827008 may be 'a' or 'g'
  5'UTR (872617)..(872860): Exon 2a
  5'UTR (904952)..(905030): Exon 2d
  5'UTR (922549)..(922630): Exon 3
  5'UTR (926021)..(926059)
  5'UTR (929123)..(929176): Exon 5
  5'UTR (993104)..(993154): Exon 6
  CDS (999562)..(999608): Full exon range is 999547-999608
  exon (1000354)..(1000456)
  CDS (1000354)..(1000456)
  exon (1002118)..(1002284)
  CDS (1002118)..(1002284)
  exon (1006117)..(1006249)
  CDS (1006117)..(1006249)
  exon (1007860)..(1008036)
  CDS (1007860)..(1008036)
  exon (1010940)..(1011014)
  CDS (1010940)..(1011014)
  exon (1018160)..(1018291)
  CDS (1018160)..(1018291)
  exon (1018800)..(1018919)
  CDS (1018800)..(1018919)
  exon (1020028)..(1020225)
  CDS (1020028)..(1020225)
  exon (1026659)..(1026736)
  CDS (1026659)..(1026736)
  exon (1028113)..(1028167)
  CDS (1028113)..(1028167)
  exon (1034316)..(1034374)
  CDS (1034316)..(1034374)
  exon (1041390)..(1041455)
  CDS (1041390)..(1041455)
  exon (1043121)..(1043350)
  CDS (1043121)..(1043350)
  exon (1044868)..(1044989)
  CDS (1044868)..(1044989)
  exon (1047519)..(1047589)
  CDS (1047519)..(1047589)
  exon (1050296)..(1050391)
  CDS (1050296)..(1050391)
  exon (1060368)..(1060441)
  CDS (1060368)..(1060441)
  exon (1062648)..(1062708)
  CDS (1062648)..(1062708)
  exon (1064561)..(1064620)
  CDS (1064561)..(1064620)
  exon (1066207)..(1066314)
  CDS (1066207)..(1066314)
  exon (1067768)..(1067864)
  CDS (1067768)..(1067864)
  exon (1068609)..(1068681)
  CDS (1068609)..(1068681)
  exon (1073289)..(1075279)
  CDS (1073289)..(1073388)

SEQ ID NO: 202 - protein, 834 aa, Homo sapiens; identical to SEQ ID NO: 188
